United States Patent Application Publication US 2025/0205292 A1 - sequence listing, part 10

SEQ ID NO: 16 - DNA, 2344394 bp, Bifidobacterium adolescentis
  source 1..2344394: mol_type = genomic DNA
gtggctgataacacgacaacagatcctctcgagcaggctcgtggggtgtggtccgacgctttggccctgctgcaccagaatccgtcgctgtccgtacgtgacaaaagctggctggagaacgtctatcccgaaggcatgtggggtccgaccatcatgctgtgcgtgcccagtgaggcggctcagcaggctttgcagaccgaattgaacaagccgttgatggaggcgttgcgcgaatccgccgaacaggacatcttccccgccttcaaaatcgttgaaatgaagccgaaaacggaggaacagccggaggaaacctatccgcgcttctcccccgcgaaatcgccggcgaagtcccctgcgaacgagacgatgcagggccagttgccgattcccgcgacgatgccgccggaacaggaccatttccagagcggccagaacaggccgctgctcgaccccgaaacgcatttgaacaagaacgccaccttcgacaccttcgtgcccggcgattccaaccgtttcgcacgtaccgtggcgctggccgtggcggagggttccggccatgatttcaatccgttgtgtatctacggaggctccggcctgggcaaaacccatttgctgaacgccatcggcaactacgcgctggtcaaggaccccaatctgaaggtccgctacgtcaccagtgaggaattcaccaacgaattcatcgaggctctggccgatacgaaccaaagttccggccagatcaaggaattcaaccgccgctaccgcgaggtcgacgtgctgctcatcgacgatatccagttcctgagcggcaaggacgcgacccttgagcagttcttccacacgttcaacaccctgcatcaggccaacaagcgcatcgtgatcgcctccgatgtgccgccgaaggacctgcagggcttcaacgaacgtctgatctcccgcttcgaatcgggcctgaccgtggacgtcaaaccgccggatctggagacgcgaatcgccattctgcgcatgatcgccaccatgaacggctccaatattcccaacgacgtgttcaacctgatcgcggaacggttcaccgagaacatccgcgagctggaaggcgcgctgaaccgtgtgaccgccatggcgtcgctgagcaaccagccggtcaccaaagcccttgcggagcagactttgcaggacttcttcaccaccgacgtggaaatcaagcccgcggacatcatcacgcaggtggccaagtacttctatttgacgttcgacgacatcgtcggccgttcgcgtaccaagaagatcgcgctggcacgccagattgccatgtatctggtacgcgagctgaccagcatgagcctcaacgacatcggcctggtcttcggtggcaaggaccacaccaccgtgatgcacgcgtatacgcgcatcaacgacgagatgcaggagaagcaggagatctacaactacgtgaccgagttgactctgcagctcaagcagcgttccaacgacaagtaacggaagcaaccacaacaaacggcgtatttccaacggttttccttaggctggtaaattatttaccagcctttttactatccgcgtgacacgcccggacataatttcttgtacatcgagttttccacatacatatccacatttcggggaaaggtctgtggaaaagccgttggaaacacggaaaacggcagtgtatagctcgtggattattcacagtgaattgtggataagttttgcgcggccatgagcctgtggataacccatgctcttatccacattcgactcagaagttatccacagatgtcgcctcgtactgagacgttgctgcgcttgggctgaacgagcttatccacactatccacagggcttattattacgaaagtacgtttttcttactttcatcgtcattctcgtaatgcggggaattccccacgctttcgtcgtcgttgctcttatcgctagaatggcatgtggatcgaacgaaacgaggaataccccatgaaagtcgaagtcaattcccaagctcttgccgatgccgtggcatggaccacacgtgtcatcgacgcacgtcccgcaaccccgattctggcgggcatccgtctggaagccattgacggcacactccagctttccgccttcaactacgccatttccgcacgccatcacatcgaagccggcgtggatgaggccggtagcgttctggtgctgggcaaactgcttgccgacatcaccaagtcgctgcccgctgcgaaaacctatctttccactgatggttccacgatgaccatcacgtcgggcaagtcgaccttcaccatgcagctcatgccggaaagcgaatatccggatctgcccgtggtgccgatgaaactgggtcaggtggactcccccaccttcgctcaggccgtcaaccaggcgtccgtcgcggtctcccgtgaggagaaccgtccggtgctcaccggcatccgcgtccagttccaaggcgacaaggtcatcatgagctccaccgaccgtttccgtctggcccgttccagcttcacctggacgccggaggatgcgaccatcagcaccaccgctttggtccgtggctcgctgctgcgcgacatggcgcgttcgctggacgagcatcagaacgtcaccatcgatttcgatgcggacaacccgtccctgctgggcttcgagaacgccggccgcgtgtccacctcccagctcatcgacggcgaattcccggccgttgaccgcctgtatgccgatgaatacccgattcatgccgtcatcaacaagcaggccctcatcgacgccatcaagcgcgtttcgctggtcgccgaacgcaacgccccgatccgcatggtcttctccggccaggagctgacgctgtcggccggcaccgccgacgaagcacaggcgaaggagattctcgacatcgacatggacggcgaggacatcaccgtggcgttcaacccctcctatctggtcgacggcctgagcgccatcagcgagccgttcgtgcgcatgaagatgaccaccgcggtcaagcccgtggaattcaacggccagcaggaagcggattccgacgaatccatggactaccgttacctgctcgttccgatgcgcttcaacaactgatttcgttccacctgtggcccggacggcaagttcccgtccgggccaccatgccatcaccttcaaggaattccggttttcatgcatatctcccgtctcgcgctcgaccattaccggtcatgggaccattgcgtgcttgatttcgaaccgggaatcaacattctccaaggctcgaacggcctagggaaaaccaatatcgtggaagccgtggaaatgctgtccaccggctccagccaccgcacctcgtcatcgctgccgctggtcgaaaaaggccacccttccgccactgtccgggccaacgtcgaagatgcgggcgaacagcgtacatatgagatcaccatcgccgcgcgaggcgccaacagggcgcgcgtggacggcggaaaatcgcaatatatgagggatatcgtgggtttggtcccctccgtgtcctttacccccgaagaccagcggttggtgtctggcgatccggccacccgacggaacttcctcaaccaggcggcttcgctgctgttgccccgttatgcgcagtcgttgcaacagttcacgcacgttgccaaacagcgtgccgcattgctcaaacagctgtctgacggctccggcatcgatcccgaatacgggcgtcaggccgtgctgagcggtctggaagtgtggaccggccaattcatcgccctcggcgtgcaattgaccaaggaccggaacgatgtgatcggactgctgcgcgagccgttcacccgcatctatgcttcgttggcgggcgaagaggaacaggccgacctggtgtatgagccgtccttcgacgaggtgcttctgttcgacgagccggccgcggaaatcagccgtcatttccaacgcatctaccccggcgaagtggcccgtgggcagaatctgatcggcccgcagcgcgatgatctgacattgcggctcaacgacatgccagcccgcgaattcgcttcgaacggcgagatgtggacgatggcgttggccctgaaaatggcgctgtacgaagtggtttcggcgcagcgcgacgtcaagccgatcgtgatactcgacgatgtgttcgcccagctcgacgagtcccgtcgcgggcagatcctcgacttcgcgcgacggcaggaccaggtgctgatcaccgtcgccgcggcaagcgatattccgcaaggcgaggcgcatgtcatcgacgttgccgcgctgcgtgcgcaatcgcaggagacggacggtgatatcgcggcgatggcggccatgcttgccgccggacgtggcgcgcaatcgcaaggaatcgaggccgaatcctaatgccgaaaccaccaatctgcgaactgctgaacctcgaccaacgcaaactgccggccgaagtgttcgaccgcatcagcgaccgtgccgggcggctcaaggaacgcgaggaacgcgcgcgcaaggcgtgggaaagcttcggcaaacccggacgcgatccggaaaccgtcggcagcctgttcaatctgctggcatcgaacggcgcatggataccccacctcaaaatggcgcagatgcgcgaccattgggaccaggtggtgggcgtggagaacgcgaagcactcctaccccgccagcctgcgagacggcgtgctgacgatacgttgcgacagcccggcctgggccaccaccctgtcgtatatgacgccgttgctgacggacaccatccgcaggaaactcgaaggtctgaccatcaatgaggtgagggtcaccggcccgcagagccaagggttcagccgtgggcgtatctcaaggaagattcgctactgagggctattgcgaagtcgacttacaatcgacctctctgacaggagagatcgattgtggcgcgcgtgaaacaggccgttgcgacggggtttacggaggttttccggctcgtcggacgcgttcggaaccatgccgaagccgttgaaaaccgttgaattccaaggacaaatgtctatagcgcgctgtccccctccatgagtagaatatccagcagtgtatgtaaacgcctagaaggggcctttatttgcgttctaggtggtatcacctgcggaaatgacccttgatggcgggaaaaatgcaggaaggaatctctgtggcagaccttgatgcggattcgctgaacgaatcagctgaaaacacgcaggaagatcagattcaggatcagatccagaacgaccagctcgaagatgcgcaacttgacgattcgctgtctccggaacactacgacgcgtccgatctgagggtgctggaaggccttgaggcggtgcgtatccgcccgggcatgtatatcggctccaccggccctcgcggcctgcaccatctggtgtatgagatcgtcgacaactccgtcgatgaggcgcttgccggctacgcgtcgcacatcgaagtgacgattctgccggacggcggcgtgcgcgtggtggacgacggccgaggcatcccggtcgacgaagtgccgggtgaaggcatctccggcgtcgaaaccgtgatgaccaagctgcacgcgggcggcaagttcggtggcggcggctacgcggtctccggcggcctgcacggcgtgggcatctccgtggtgaacgcgctgtccacccgcgtggacatcgaagtgcgccgtcagggcttccactggacccagacctacatcgaccagaagccgaccgcgcgtctgctcaagggcaagccgatggaggaaggcgaatccaccggcacttccgtgaccttctgggccgatggcaagatcttcgaaaccaccacctacgatttcgagatcctgcgcaaccgcttccagcagatggcgttcctgaacaagggcctgaagatctccctgaccgacctgcgcgagcccgaccaggccggcgacgaggtttccggcgaggaatccgaaaccgaagacaagttccagaccgtcacctaccagtacaacgacggcatcaaggactacgtcgactacctggtgaagtcccgcaaggccaccccggtcgaaccggacgtcatcgacttcgaggccgaggacctgaagatcggcatctccgcggaaatcgccatgcagtggaccaccgcgtattccgaagccgtgcacaccttcgccaacaccatctccaccaccgaaggcggcacccatgaggaaggcttccgcgccgcgctgacctcgctggtcaaccgttacgcccgcgagaagaacatcctcaaggacaaggacgagaacctgtccggcgacgacgtgcgcgaaggcctgaccgccgtcgtgtccgtcaagctcaccaacccgcagttcgaaggccagaccaagaccaagctcggcaactccgaagcgaagaccttcgtgcagcgcgtcatgaccgacaagctcggcgactggttcgacgcccacccgaacgaggccaagaacatcatccagaaggccatcgaggcctcccgtgcgcgtctggccgccaagaaggcacgtgagaacacccgccgcaagtcgatcttcgaatcggccggcatgccggacaagctcaaggactgccagtccaacaaccccgaagaatgcgagctgttcatcgtggagggtgattccgcaggcggctccgccatccagggacgcaacccgatcacgcaggccatcctgcctctgcgaggcaagatcctcaacaccgagcgcgcaagcctggaccgcatgatgaagtcggacaccatcgaatcgctgatcaccgccgtcggcggcggctacggcgaggacttcgacctcaacaaggtgcgctaccacaaggtcatcatcatggccgatgcagatgtggacggcgcgcatatcgcaaccctgaacctgacgctgttcttccgctacatgcgtccgatgatcaccgccggctacgtgtacgtggccatgccgccgctgtaccgcctcaagtggaccaagggcccgcacgacttcgtgtacaccgacgccgaacgcgaccgcgtgctcgccgaaggcaaggccgcgggccgccagctgccgaagggcgaaggcatccagcgctacaagggtctgggcgagatgagctaccaggaactgtgggagaccaccatggatcctgaccatcgcattctgaagcaggtgcagatcgaagacgcggccgcggccgacgagaccttctccatgctcatgggcgacgaagtcgaaccacgtcgtctgttcatccagcgcaacgcacgcaacgtcagctggatcgacgcgtaaacgcgtagggtttcgcaggacttcaaagcaaggattagaaattggcagacgaaaacaacagcaacgaagacggccagttcgtgcctgacggctccatggaaccgttgagcccgcaggaggccgacaacaccgattatggcctgatggtcggcgaacgcgtccagaagaaggatttgcagcaggaaatgcgcgaatcctatctggcgtacgccatgtccgtcatcgtcgatcgtgcccttccggacgtgcgagacggcatgaagccggtgcaccgccgcgtgatttacgcgatgtacgacggcggctaccgccccgaccgcggctactccaagtgcgcacgcgtcgtcggcgaagtcatgggcaagtaccatccgcacggcgattccgccatctacgacacgttggtgcgtatggcgcagtcgtggtcgatgcgatacacactcgtcgacggccagggcaacttcggctcccccggcgacgacccggcagccgcaatgcgttacacggaatgccgtatggcgccactcgccatggaaatggtgcgtgacatcgacaaggacaccgtcgatttcctgccgaactacgatggcaagacgcaggagccgaccgtgctgccggcccgcttcccgaacctgctgtgcaacggctcgtccggcatcgccgtcggcatggcgaccaacattcctccgcacaacatgcgcgaggtggcagaaggcgtgcattgggcgctcgaccatccggacgcgagccgtgaggaactgctcgacaacctgatccgcatcatcaagggaccggacttccctaccggcgccacgattctcggccataagggcatcgaacaggcgtaccgtaccggccgtggcctcatcaccatgcgagccgtggtgaacaccgaggagatcaagggccgcatgtgcctcgtgatcaccgaactgccgtaccaggtcaacccggatcgtctggtcgtgtccatccgcgaagcggtgcgcgacggcaagatccaaggcatcgccgacatgcgcgacgaaacctccggccgtactggccagcgcctcgtgctcgtgctcaagcgcgacgccgtgccgaaggtcgtgctcaacaacctgtacaagcattcccagctgcagcagaccttcggcgcgaacatgctggcactggtcgacggtgtgccgcgcacgctgtccctggatgcgttcatccgtcattgggtaaaccaccagctcgaagtcatcgcacgccgtaccgcctacctcaagcgcgaggccgaggaacgcgaccacatcctgcagggctatctgaaggcccttgacatgatcgatgaggtcatcgccctcatccgtgcctccgagtccgcggagaccgcccgcacgggccttatggacctgcttgacgtggacgaggtgcaggccgacgccatcctcgccatgcagctgcgccgactggccgccctggaacgtcagaagatcctcgacgagcacaacgagctcatgcgcaagatcgccgactacaacgacatcctcgccaagccggaacgccagcgcaagatcgtcggcgacgagctggacgaaatcgtcgccaagtatggcgacgaacgccgtaccaagattctgccgtactccggcgagatgaacgtcgaagacctgatcgccgaagaaaacgtggtcgtcaccgtgacccactccggtttcatcaagcgcaccaaggccgacgaataccgcgcgcagcaccgcggcggcaagggcatcaagggcgccaagctgcgcgaggacgacgtggtggaccacttcttcctgaccagcacgcacaactggctgctgttcttcaccaacaagggccgcgtgtaccgtctgaaggcatacgagctgccggaaggctcccgcgattccaagggacagcacgtggcgaacctgctgcagttcggcccggacgagacgatccagaccgtgctgtcgattccgaactacgacgtggccaagtacttggtgctcgccacccgttccggcaaggtcaagaagaccgcgctcgccgaatacgactccccgcgtcagggtggtctgatcgcggtacgactcatgaccgacgagaacggcgagaacgccgacgagctgatcggtgccgcgctgtgcaacgccgacgacgacatcatcctcgtctctaagcagggcatgagcctgaagttcgaagccaacgacgagcagctgcgcccgatgggccgccagaccgccggtgtgcagggcatgaagttccgcgacggcgacgagcttttggccatggatgtggtgcagggcgattccgacagggatctgctcgtggtcaccaacgagggcttcgccaagcgcaccgccatcagcgaataccgtctgcagggccgtaacggctacggcgtcaaggccgtgcagctcgccgaaggccgtggctccctggtgggtgccgtgatcgtggaggaatccgaccagatcatggccatcatgaagtccggcaaggtcatccgctccaacgtcgccgaagtcaagcgcaccggacgtaccacccagggtgtgacgctcgccaagcctgacaagaacgacgaaatcatctccatagcacgcaacgaggagaccgacgaggatgacgccgagcaagccgccgcggaaaacggagcagtccagaacgacgcagccgcgcaatcgcaagccgaaaccactactgaaaactccgctgaaaccggtacggaagccacttccgatgccggcgatggcgagaatgtagaggcctgagacacaggcggggaatcgtctgcgaaaactggtagcctcggctagaagtaggcaagattctgcaaggagcaacgatgagcgagaacaatgaaagccatcaggcgcaggcaggggcgcaggccccacgcgtggcccgttccgcatccagccagccgttgagcggtacggaacagtctcaggcgcatgagaacatggccgccgcgtccggcggtgtgaaggttcgtgaaaaagcgcgtcgtggcgcgcctcgcgcccgccgcatgagcctgtccctgacccgcatcgacgcatggtccgcggccaaggtggcgttcatgctttccatcgcgggaggcatcatccagatcgtcgcggtgacgctgctgtggctgctgctgaacgtggtcggcgtgttcgatcaggtgacgcagatcgtgtcctccaccggtcttgacgccggcggattcgaccttgccaacgtgctttcgctgagcaccgtgctaagcgcggtcaccatcttctccatcatcgaagtggtgctgttcaccgtgctggtggttattctcacgctgctgtacaacgtggtgagcacgctggtcggcggcatccacgtgacgctcggcgacgactgatcgattcgtcatacggcgttcgtacggcgcttgcgcaacgtaagccgttcgtgcaacataagaagacggcgcttccctacttcgggaggcgccgtcttttcttatgtaatcgcgattatgcggtcgcttttatgcaatcgtcatactgcgttgcgcgttatgccgtaacgcatatgaaaacggtccgtgcgaacgaatcgcacggaccgttgaaacggattgtgaaagacgatcagagcacgccctgggcgaccatggcgttggcgaccttgacgaagccggcggcgttggcgccgagcatcagatcgccctcatggccgtactccttggcggcggccagggaattggcgacgatgttctccatgatggacttgagcttgttgtccacctcttcgaacgtccaggaaaggcggtaggagttctggctcatctcaaggccggacaccgccacaccacccgcgttggcggccttagccgggccgtacagcaggccgttgtcctgatagacggcgattgcctccggggtggacggcatgttggcgccttcgcacacgaccttgcagccgttggcgacgagggccttggcggactcctcatcgatttcgttctgggtggcgcacggcagcgcgatgtcgcacggcacggtccacacgcccttgcagccctcgtggtattcggcacccggaacacgctccgcgtactccttgatgcggccgcggtggccgagcttgatgtccttgacgatgtcgagcttgatgccgtccggatcgtagacgtagccgttggaatcggaggcggtgacgaccttcgcgccgagggcctgggccttctcggtggcgaagatggccacgttgccggagccggagatgacgacggtcttgccttcgaaggaatcgttcttcaggacgcgcagggcttcctgggtgtagtagcacaggccgtagccggtagcctcggtgcgagccagggagccgccgaattcgaggcccttgccggtgagcacgccggagtattcgtcgcggatgcgcttgtactggccgaacaggtagccgatctcacgggcgccgacgttgatgtcgcctgcgggaacgtcggtgaactgtccgatgtgacggcacagctcggtcatgaacgcctggcagaaacgcatgacttcggcatcggacttgcccttcgggtcgaagtcggagccgcccttgccgccgcccatcggcaggctggtcagggagttcttgagaatctgctcgaagccaaggaacttgatgacgccctcgttcacgctcgggtggaaacgcagaccgcccttgtacgggccgatcgcggagttgaactggatgcggtaaccgcggttgacctgcaccttgccctcatcgtccgtccaggcgacgcggaacttcaccacgcgctccggctcgacgaggcgctcgagcacgcccgccttctcatattccgggtgcttctcaacaaccggctcgaggctttcgaagacctcgcgaacggcctgcaggaactccggctggtcgccatcgcgcttctcgacctgcgcgtacacgcgcttgacgtactcatcagtgagcatatttttccccttcgggatagttgggttatcaatacggcggtttcattctatgtgcttgattgtgagacgcacaagatattgctcaagatttggctggaggcgtttggaacgctataggatagtgtgtggaaggcgaggagagagcgtcgtccgcaacatcaactccctcattttccacaggagaaaaaccatgcttgaaggattcaagaagttcattgcacgcggcaacatgatcgacatggcggtcggtgttgttatgggcggtgccgtcaccaccgtggtcaattcgatcgtgaacagcgtgatcaacccgttcatcgccatgattttcggcaagccgaatatggacggtctgctggcgatcacgttcaacggcgcgaccgtctcgttcggcgctgtgctgggcgctattctgaatttcctcatcatcgccgtcgccgtctatttctgcattctggtgccgatcaacaaattccgcgacatgaccgaggcgctgcttgccaagaccaagcttgccgagcagaaggaagccgaggaaaaggccgctgaagagccgtctgccgaagagccgtctgccgaagagcagaccgtccagctgctgcagcagattcgtgacgagatggccaagcagaacgctgcccgcaactagttgcgattcgtggtgccactcccctactgatttgatgattccggccgcttgcgggtatgcaggcggccgttttatttggtttgcgggcgattgtgtcagttgggtggtcggcaagaggctgaatacgaaaaaggcttccgagtaatcggaagccttcaattctgtggagctaaggggattcgaacccctgaccctctccatgccatggagatgcgctaccagctgcgccatagccccgtggagctagccgggttcgaaccggcgaccctctgcttgcaaagcagatgcgctaccagctgcgctatagccccataggtgaaaaaagcggctgtgccgcttccttaccatctacgtgggcccgggaggacttgaacctccgacctcatccttatcagggatgcgctctaaccacctgagctacgggcccaacttgctgtgtcttgaacacaacgaattgaaatgatacttgaatcacagggaaagtcaagtgccgccgtgtcatcggcgtgtcgtggcataatgcaggcatgacatacgggcagcgcaacggcggtaacggccgttacggcaggggagtggggcatcgcaaccgcaatcgcgtgatttccgaaacgacggcgagcatcgccggcatgcgggtggccatcgtgcgcaaacccatcaaaaacatgtacctgcgcatcaaaccgccgaacgcggatatcgtcatctccgcgccgcaacgaatgtcgcaaagtgctatcgaacggtttgtgacggaacgcaagccgtggatcgaacgggcgcaacgcagcatgcggcaggccagagacgcgcaactcaacgcgcagcgtgcgcaaaacggcaatattggcgatactggcgcttccgccaacccgcccgctttcgtatggacggacgaggccaaggcgcgggcgcaacgcaacatcgaatcgcaattgcctgtgttgcttgccaaatggggcccgatcgttggccgtacgccgacgcatatcacgttgcgtctgatgagttcgcgttggggatcgtgcacgccgaagaccggacgtatccgacttaacctgcagcttggtttaatggctcctagattccttgaatacgtgctggtgcatgagatgacccacctgtgggagaacggccacggagagggctttcaaaggcgtatgagcgcctatctgccgcaatggaggcagtcgcgccgcgacatcaaccggcaggtggtgctgtaagaggccgcttgggttacttgccgtccgccgcggaatcgccagccgcggaaccgtcctcatcggcggtgtgccggcgcacttccagcgtttcgatacgacggccgtccacttcggtgacgaccatgtcataaccgtcatcggatgacagcacgtcgccgacctcgcccattttgccggtgtgcgccaggaaatagccggcaaccgtctcgtacgggccgtcttccagctcgatgccggtcaaatccgcgaaatcctcgatcgtcatgccaccttcgatggtggccacgccattgacgaaagcggtgcgttccgtacgttcgccgcccttttcctccggcaggtcgtattcgtcgcggatgtcgccgaccaattcctcggtcatgtcttccaacgtgacgatgccgtcggtgccgccgtattcgtcaatcaccacggccaggtgaatgcctcgtttgcgcagcagctcaaggcttggcagcagcttcgacgtgcccggcagggaaatgccctcacgcgtcacgtcggcaacggttctcgccttcggatcgcggatgtcaagcaggtcgcgcacgtgcacgaagccgagcacgtcatcgaaatccttgccggtgacggggtaacgcgaatacggcatttcacgcacgtacgcggcggcttccgcaatcggcatggagccgtccaggaacgcgacgtcggcacgaggacgcatgacctccgccacaatggtttcggatgcgtcgaacacgtcgtcgaggatggtgcgctcgtccttgctgaggttggtgttggtgttgacgagcacgcgcagctcgtcgtcggacacctcgctgtcggtttcgttcggatcgaagccgagcagccgcacgatgccgttcgtattcttgccgatcagccagatgatcggcttgcacactttggcgaacacatggatggccggcaccacggcacgcgcgatctgctcgttgcgttgcatggcgatacgcttcggcaccagttcggaaatgacgatcgagcaatacgagatgatcagcgtcaacgcgatggtggtcaggggagcggcgacgttatgcggcacaccccagtcttcgatgaccggcacgatatacggggcgattgaggattcgccgaacgacgcggacaggaagccgcacagcgtcacgccgatctgcacggtggacaggaacgtgttcgggtcgcgtgcgatctgcgccacacgcttgccgcgcgcatcctcctgttccatttggtcgatctgcgatccgcgcaggctgaccagcgccagttcggtgccggcgaacacggaaccgagcagcaggaaaatgaaaatcagaaggatgttcaaaccaagcgacatgattccaatctaaagcaacggcatgtcaaaacagcgcgacgcaacggatccggaagccgtctttttccggaaaatcgtcagaagctcagcacttccaccttgccggaatcgagctggtagcgtgcgcccgtgatcatcagccgatcctcggccagcgcgcgctggatcacttcggaacgttccaccagctgttcgatggtgcgtgcgatgtgcacgcgctcgaaatcctccgccgattccagttccgattcgtgcgcctgccaaatcgaaaaaccgaccgtgcgcatcatgatcgaatccgaatcgcagatgcgttcgtcgatgtcggaaatgctgtcggcggccatcagcgaatcctccgcgtcggcggtcagctcgtgcagcagcgcctcgtattccttgcatgcctgcttgatcgcgccgcaattctgatggccgagtaccaccaaaaggcgcacgccgagcacgtccaccgcgtattccaaagaggcgatcacagcatcgtctatgacctgccctgccgtgcgcacggtgaacagatcgccgatgcctgcgtcgaaaataatatcggggctgacacgcgcatcagagcagctcagtatggccgcttccggtgcgtgtgtgtccacaagtgcctcgcgtgcttcagcgccacgattcggatgttccggtttgccctccgcaaacctgcgattacctgccagcatgcggctccaaacgccgcttgccgtgccttcgacctcgtcttggtctacaaacagttcgtctgccattgactccacccctcattgttcaggctagccaacatcatacgttttggtctgaccgttcgctgggaaatagagcgatatctcgcttatgtatggcagatttcgtgttctgtccggtgatatttcgcttatgtatggcagtcccaaaggtgaaaaaccggaaaaatgtacccccgaagtgggtttttcgcatgatggtctgccatatataagcgagaaggctcatgacaaggctccgattctgccatatataaggcagatataggtatgaaaaagggtccccgatcggcagtgcgaacggggaccctgaaagaaactggctaaaatcagccggtgttctgcaggcctgctgcgacacccgacacggtgcacaggatcaggtaggtgttactgcagtctgcagaagatgaaaagaataagagctaaaacaagaaaggcggcaccgcttattctcattaaggatgtgtatagattgctcggatctcctttttgagtccagaggaaattgcttattttccagagttgccttggaaaaataagcatacataatcctagcagggcaagtgctgtgagatatatgtactgcactgttctccttattttaggtagtcggagacgcaagggtatggtccttgtttattataaaaaaggctgctggtgcagacaagcttcctgctgagagagaagctgaagtgagtgctcgggctttcgccgcgttcatagctcaaccaagacggtagttcgcataatgtgtaatatgtgggcagatatggcatatgccacatctgcccacacattatcttctacttaggatccttctggtggatgaatggaaagctgctacataaggagtgccagtgcgaggaagaatcctgtaatacccgtggctatcagtacggtgatggtgatgattccggcgaagatacgtacagccaagatcttccttccatgactcgaggggttggttgcggctaatttcgttattccaaccacagaccagcaagctatgcccagtgccagtgtcaaaaattctcgaaaccattccgcctcaagcaagggaaggccgacgatcgatgacggatcgcttgctagttttggcggaatggcgcataggatacgttccaacatcaggtaagggccatcgaaatggaccagattcagagtgaatgggagcagcagcaccagccctatccaccataggatgcgccgagtgattatgagcttggcatccagtgtcccggcgtcgcccttcgtcttgatgccgtccgttggtccggtgttcccgcgctcatccgctgacttgtccatgtcccctccgatcagccgaggtgccccgttccgtgtgcgtccgttccgtgtgcgtccgttccgcacacccgcccggcgtgccccgccgccggccagtctagggcggatgacgcgagcggggaggcccgcgccgtcgatcggcacggaacctccccgctcgcttttgtcaatcggtcatccgaagatcagcccgtgttctgcaggcctgcggcgacgcccgaaacggtgcacaggatcagataggtgtagttctccttctgtccgtgcgtgagctcttccttgtccacgcgcttgcgcagcgagccgagggcgagcacctgggtgacggacagcgcatccacgtacggcgagcggatgcggatggcctggccgagcacgtggcggtgctgcagcggccattcgtcgccgacgatcttgagcacccacttgcgggtgagctccatctcgtcgaggaccttcttgttgaggtcctcacggtcgccgagggcgaggtacatcttggcgatgcgctcgtcagtcttggccagcgacatttcgatgttgtcgatgaacgtggagaacagcggccactcctcgtacgcctgacgcaaggtgttcaggtcgccgaactgctcgcacgcggtgccgaggccgtaccatgcggccaggttgatgcgggcctgggcccaggagaagatccacggaatggtgcgcaggtcgtcgagggacttggcgcccagaccacgcttcgccggacgggagccgatcggcagcaggccgatttcggtcagcggcgtgacggtggagaaccacggtgcgaagccgtcggtgttcagcaggtcgaggaagcggttgtgcgcggcctcgtcgagcttgctggccatgtcggcgtacttcttggtcatgtccgtgttgcgcttctccacgctcggagcggactgcagcagcgttgcggctgcgacggactccacatggcggattgcaagcaccgggttgccgtagcgggcgaagatgacctcgccctgctcggtgagcttgaaacggcacttcacggagccgaccggctgtgcgagcacggcgcggttggccgggccgccgccacgaccgacggcgccgccgcggccatggaacagggtcaggtcgatgtcgtgcgattcggcccacttggcgatgcgctcctgcgcggagtgcagggcaagggtggcggaggtcgggccggcgtccttcgaggagtcggagtagccgagcatgacttccatcttgccgccggtggccttcagacgagcctggacctccgggatcttgatcatttcctcaagcacgtccaccgagttctgcagatcctcaagctgctcgaacagcggaatcacgtcgatggtcggaacatcctcggggtgggagaacgccagacggttcagctcatacacgtccttgatgttctgggcgctcttggtgaaggagatgatgtaacggcgggcggccttgatgccattgcgcttctggatggaaccgagcgcgcggaaggtgtcgagcacctcgtgggtcatcggctgcagctcgccacgctcaccgtgcaggccatgctcgcggatgtcctccagagcgcgggaatgcacgacggaatgctgacggaactccatctcgaccatgtggaagccgaaggtctcggcctgccagatgaggtcctgcagcggaccgtaggcggaacgcttggcgttggcttcggcgagggagcgctgcacggtcttcagatcggcgatgtagtcctcgcaggagcggtacatgaggtcggcgtcgcggtcgatggtggccttcagacggtctgccatgaccagcatgacggcgcggtgcagctccttggtggagatcagcgcggccttgtcggtcagacgctcgctcatttccttctggtggttccacagggacttgagctcggcgctcggcggggtggtctcggcctccatcgtcaggttcttgccgacgcggcgggtttcgatctccagcgcgcccagcacatggtcgctgaacttgcgggccacctgacggctcaccttggcggtgacgttcgggttgccgtcacggtcggaaccgatccagcttcccggatggaagaacgccgggcacaccggcggcacgaggccggccttgtctccgaggacccagtcgtcgaaacgacggtagacctgcggaatggtgtagaacagcgtgttgtcgaagatatcaagaatggtgtcggcttcctcaaccggagtcggcttcttcagcgcgatcggggaggtgcggaacagcgcgtcgatctcgttgaagagtcgacgggagttttccttcttgtccgagccgccgagcagcttatgcgcttcgagcagctgggagatgcggcggatcttgccttccacggccttacggcgggcttcggtcggatgcgcggtgaacaccggatggaactcgagctggtcgagcagctccttggccctggccggacccatctcgttgatgagctggtggtaggcgcaggtcatttcgttcaccgggtcgacggcctgggcgtcatccacggcggcctcatggctgtgtagtacggagacacggtagttctcctcgcacagattggccagatggaagtaggtggtgaaggcacgggccagcagctgtgcctcatgcacatccgtctggtcgatgatgtcgacgaccttctgcaggtcgtcctgatcgggattcgtgtcggtcagaatgccggagaaacgttcgtcgctggccttcagcgcatgttcgcgcacttcatcgaacttggccagcaggttttcatcgaactcaccgagcacctcgcgaagaatctgcagacacagatccatttcctctttgagggatgcgggaagatcacgctcctcagggcccttggtgccggtgccggacgagacgatagccgcgtccgcaggcgtgatctgttcgttttcagttgtcatcagacctccttctccaaaccatcgggttgctcggtctgtcggtccttcgcggcacctccgcgattgttttggccgtctgttgcgagcccacagccctaagcttggtgggtaaatgctcgaccattgtaggcgcggcaaatcgacagtttggttacggaaacgccggaatggttcgcatcgtggacattgaatgtccggaacatgaaaccgatggggcgtcgtaaaatttcccgaccagtccacacgttagacctgaatactgtgagcgcactacatgaacatgacgagaatgctgaacgtgttgacaacagcgcgaaggcagtcagcaaattccacacacactccatcccgctcgatatggaagacatcgaacgcgattgggacaagccggtcaccgaagcgggaatcgcagcgaaagccagcgtgatcgtccgtgtcggcatgctcgaccttggcgccggaacgggaagcttccgcgtccgcgaaatgatgcaccgcatcgcctatccgttaggcgtgcacgtgcgcgccgacgtgaacctcaccgacatcgaggcatcctgcacggacggcaaggaccgcatcaccgaagtcgtcgacctacccacaactggcgtcaacaccgagcgcatctggctgctcgaacacttcgccgactggttcaacgtcaacctcggcaaaggctcgatgtaccacagccaatccgacgtttccgaagggctgatgcagcatctcgacaagcgcgacgcctcgcaggtgtcggccgaactgtccaagcagctcaaggaacggcagaaggccgagcagaaccaggaaggttccgacgatcccgtgctcgacgcgctggaaatggtcacggaacgcgcgcaggaaggcgattccaccgcacgtccgctgcacatgcgcgatatcgaggcggcggccgcggccggacgtagcaatggcgattcggtcgcggaaaagccgcgtaagaaccgcaactgcaaaccgccgaaggaatatgccgagcatttcgaccatatcgggaaagccgcgggcgaatcgcaaggcgtcaccgtacggcaggcgcacgagcgactcgacatgatcgaacgtcgcaaaccgctgtattcgccggccttcgcgggactcgcgtccgcctgcgcctgcgcatccttcgtgttcctgctcggcggcggcccgtacgacatgatcggcgcgttcgtcggcgccggcctcggccactggctgcgtcgccgcctgttcgcccaccatctcaaccaattcttcgtgacgttcgtctgcgtggccgtcgccgcgctggcatgcaccggcatgctgcgactgattggcctgttcgatccgatcgccttgcagcacgacaccgcgtatatcggcgcgatgctgttcgtcatccccggattcccgctgataaccggcggacttgacatggcgaaaatcgacttcccatcaggcgtgcaacgactcacctacgtgctgtgcatcattctgatggccacgttggcaggctggatggtcgcttcgatcgtgcacctgaatccgcagggattcgagccgctcggactgaaccccgtcatcaactgcctgctgcgcatgctgttcgcgttcatcggtgtgtggggcttctccgtgatgttcaattccccgcagcgcatgtgcctcgtcgccgccaccatcggcgccatcaccgatactttgcgattggaaatcgtcgacttgggcgtgcccgcggaagccggcgcgttcatcggcgcgttccttgccggcctgctcgcctccgcatggcgttcggcggtgcgtcacggcctgcttgctccgcatttgggatatccgcgcatctgcctgacggttccgtctattgtgatcatggtgcccggtttgtatatgtaccaggccatgttccacctcggccagttcgatacgctgaacgcgctcgattgggcgttccgtgcgttcatggtgatcatctgcctgccgatcggcctggcgatggcacgagtagtgaccgataaatcctggcgctacgacatttaataacctgcagaagggtaaaaacacttggtaaccaaagatttctgggtgctgctggccatggtcttgtacttcgcggccatgctgaccatcggcttcatctactccaagaggtccaattcctccaccaaacagtatttcgcgggtgggcgtggcgtcggaccgtggctgacggcattgagcgcggaagcctccgacatgagcggctggctgcttatgggactgccgggcgtcgcctacttcaccggcgcggccgacccgatgtggacggccatcggtctggcgctcggcacgtacctcaactggaaactcgtcgcacgccgtctgcgccgctactccgtggtggccggcgacgcgatcaccattccggacttcttctccaagcgcttccatgacgatcgcaatatcgtatccaccatcgctgcgctcatcatcctcgtattcttctgcgtgtacgtcggcagctgcttcgtgaccgtcggcaaactcttctccacgctgttcggctgggactaccacctgaccatggtgatcggcgccgccatcgtgttcgcgtacaccatcatcggcggctatctgtccgtggtcgtgaccgacttcatccagggcctgctcatgttcttcgcgctggccgtggtgttcatcggctccgtggcgtccgccggcggcatcgacaacaccgtcgccttcctcaagggcattccgggattcctcgacggcacgcatgtggccacgccgatcctcaacgacgccggcgagcagatcgtcaaggccggacaggccatgttcggcgcgcccgccgactacggcatcatcaccatcatctccatgctcgcgtggggcctgggctacttcggcatgccgcaggtgctcgtgcggttcctgtccatccgcagttccgaggaaatcaagaaatcccgcatcatcgccaccacgtggtgcgtgatctcgctggcgtgcggcgtgtgcatcggcctggtcggccgtgccatgatgccgacgcagttcgccacgcaggcggccgcggagaacatcttcatcgtggtgtcgcaggcgctgctgccgagcttcatgtgcggcatcgtcgtgtccggcatcttcgccgcgtccatgagctcctcgtcctcgtacatgatcatcggcgcctcggccgtcggcgagaacatcttccgcggactgctgcaccgcaaggccaccgaccgccaggtgatgatggtggcgcgcatcacgctgctcgtcatgttcatcttcggcatcgtggtggcgttcgaccagaactcctcgatcttccaagtggtctcgtacgcgtgggccggcctcggcgcgtccttcggaccgctgatgctcacctcgttgtactggaggcgcaccaacaagtacggggctatcgcgggcatgctgtccggcacggccaccgtgctcatctggcacaacctcgtcaagccgctcggtggcatcttcgccatctacgagctgctgccggcgttcatcgtctcgctgctgttcatcgtggtggtctcgctgcttacgcccgcgccaagcgcggaagtgctgcacgaattcgaccactatctcgacgatccggacgaccgccacgtggacgacgacctcgtggccgccgaaatcgccgcaggggagaagcgctcgcagatctgaatcgccccgcggtgggtgttgcacctcctgcaacgccgaaggtcggcctttggtgccatgtcgcttgtttatggcagattccgacaacagggaaatgtcaagtggcttgtttgtggcacctgattcaggaaaccccgtgtatgtccattggaattccgacggacatacacggggtttcccgttttccatgccacaaataagccacctagcagaacggtagcctctgaatctgccatgaataagcggattggccgtgctcccggaggaacacggccaatccgctaacgcgtcaggatgccgattgcaaacttagtagcgcatgcccatggcgtcgcgcacctgctgcagcgtctcattggcgatttcgttcgcgcgcttgttgccgtcatgcaggatgtcgcggatggaatccatatccttggccaattcggcgcggcgctcgcggtgcggggccaggaactcgttcacggattcgatcacgtacttcttcagcgcgcctgcaccggagtcgccgatttcctcggcgatgtccttcggatcgcggccggtcaccagaccggcggtggtcagtagcgcggagacctgcgggcgggcaatcgggtcgaaggtgatgcggcgctcggaatcggtcgggctcttcttgatgagcttggcggtctcctccgcggtggcgcccagcatgatggagttgccgtaggacttgctcatcttgcggccgtcaagacccggaatctccggcgcttcggacaggatggcgctcggctccgggaacaccgggttcttcttcgcgtagcgctcgttgaagcggcgtgcgatggtgcgggtgatttcgacgtgcggcaggttgtccttgccgatcggcaccacgttggccttgcagaacaggatgtcgcaggcctgatgcaccgggtaggtgagcagcaggccggtcagcgcatggccggaagcctccatttcggacttcacggtcgggttgcggtgcagctcggcctccgtgaccagggataggaacggcagcatgagctggttctcggccggaacggcggaatgggtaaagatcatggtcttgttcgggtcgatgccggcggccatgtagtcgagcaccaggttgagcacattgtcctcgatgtgctcggtggtgtcgcggtcggtgatcacctggtagtcggcgatgatgatgttcgagttcacaccacggttctgcatggccacgcgctcgcggatggagccgaagtagtggccgaggtgcagacggccggtcggacggtcgccggtgagcatggtgaacttctccggatgctcctccagcttggccagcgtcgcgttcgaacgcttctttgcggcgaggaagctggcgctcatttcattgccgacagcagtgatctgctgctcctgggtttcgtccgtcatacgtgtccttttcttaagaaaatcaacgattttatcgtaaaagtctgagccgacaacgaaataatgcgcaataagtggtactctcttgtttgatgaattgatagcacagtaatttcagggggtcagatgggccgcggacgtcagaaagccaaacagcagaaaatagcccgaaagctcaagtacctgaccaccgacaccgattacgatgagcttgccaaggagctcggtgcgcaggagcccggttctggttccttcgacccgtttgccgatatcgaagccaagtattctcacgatgtggacgccgaagatgagaccgttggggacggtcaaacgtcttccgattccgccgatgaccttgacgaatacgccaagtgggccgcggaagccgcggcgaaggccacgagtggcgagtttccggcggcaaaggccgcgccgaagcctcacaagcccatcccgatgccggtgcccagcgcgctgaagccgaagaagcaggactgactgcacagattttttcaacgaatggctcgtggtttcaaccacgagccattttttattatttcgatttcgattgtcgggcgattgtcgtgctcgtcccgccaaccatcgcaggtcgcgccgcgccgcgacctattcctatgccagcggcagcaacccgctcagatcgtcgcgttcgccgacggcggtgatgcgcccggcgtccttttcctcgtcccagctggtgatgccggtggcgagcctcatccacacgtcggggtccagttcgatgacgtccggcggcgtgagattgtgcggatcggacgccggcccgtcgaggatcttgatggcgccccacggtgccacgcgcacctccacgccttcgcccggcgccttcttttccagcaggtatagcgagtagcgcaccgccatcgcccacagctggcgcggcagacgcggcgagaagttgagccggaaatcgaaagcggcgtcgtcatcggccggcagctgctcgctgaaaatgttgtgcgccgcgtcctgccactgttcgaaggcggcgcgtcctttgcccaagtcttgttctcgtatgacagccataccggtattgtgcagcccgcaaacgactatgatggaactttgcaaacgatgtagtcgtaactaaataggggtttgaggggcgattttcctgcgattgtggtgccctcgcttaatgggcgccatacgttgcgtttgcagtttttgcaatgttttttgcaaacgaatgccggcttacgattgctaggaatttcgtctttttatgattacgtagtatgctgtacatgagaacgtatgcatgatgttacttagtgttcatgcggccgcaaatgcaaggacgctggggtaaggcataatgttcctggagaatatccgtcaaagggagtcaatcaatgactgaaattaccgcaccgaagtccgcggtcaccgcggaacaattcgctgacgaaatccgtgagcagctgaagtacacccagggcgtcaccgtcgagcaggccaagccggccgacgtgtacgtcgccgcgtccgccgcagtgcgtcgccatctcgtggattcctggatgaagacccaggccgacatggtcaacggcaacaccaaggccgtgggctacctgtccgctgagttcctcatgggcaagcagctcgagaacgcgctgctcaacgccggcctgaccgatcagttcaacaaggccgtcaaggacctcggattctccgcccaggaaatcatcgacgccgaatacgagccgggcctcggcaatggtggtctgggtcgtctggccgcctgcttcatcgactccctcgcctcccttggcgtgccggcgttcggttacggcatccagtacaagtacggcatcttcaagcaggaattcgacgagaacggcaagcagatcgagaccccggattactggctggccaacgaagagccgtggggccacatcgattacaaccgcgaccagaaggtctccttcggcggcgaagtcgtcgaagagaacggcaagaaggtttggaagccggcttggtccgtgcgcgccgtcccggtcgactacatggttccgggctacgcctccggccgtgtgaacaccctgcgtctgtggaccgccaagagctacgacgagttcgatctgctcaccttcaacaagtccgagtatctggacgccgtcaagccgcaggtcgaggctgagaacatctccaagatcctgtatccggaagactccaccccgcagggcaaggctctgcgcctcgagcagcagtacttcttcgtgtccgcctccatccacgacgccatccgcgtcttctacccgggccaggacaagccggatctgaccaccttcgcggacaagatcaccttccagctcaacgacacccacccggtcatcggcatcccggagctcatgcgcgtcctcatggacgagtacggctacgattgggacaccgcttggaagatcaccaacaagaccttcaactacacctgccacaccctgcttccggaagccctggaagtgtggccgtccaagctcatcggcgaactgctgccgcgtcacctcgagatcatcgagaagatcaacgaccagttcgaggccgagctcaaggccaagggcgttgacgaggccaccatcaaggacatggccatctacaccggcgactccgtgcgcatggcgttcctggcctcctacggcggctcccacgtcaacggcgtggccgagctgcactcccagctgctcaaggacgtcaccctgaagaacttctccgacgtctacccggacaagttcaccaacgtgaccaacggcgtgacccctcgccgcttcatcaagctggccaacccgcgtctgtccgacgtcatcaccgaaggcctcggcaccgacaagtggctgtccgacctcgagctgctcaagggcctcatcccgctggccgacgatgacgagttcgtcaagaagttcgccgccgtcaagcaggccaacaaggtcgacttctccaacttcgccaagcgcaagtacggcttcgacatcgacccgaacaccatgatcaacaccatggtcaagcgtctgcacgagtacaagcgccaggccctgaagatcctgtccgtcatcgccgactacgccgacatcaagtccggcaaggtctccgccgacgacatcatgccgcgcaccatcgtgttcggcgccaaggccgctccgggctactacctggccaagcagaccatccagctgatcaacaacgtcgcccgcgtcatcaacaacgacccggacgtcaagggcaagctgaacgtctacttcccgtggaactacaacatcgagctggccatgaacctcatcccggccaccgacctcgacgagcagatctcccaggccggcaaggaagcctccggcaccggcaacatgaagttcgccctcaacggcgctctgaccgtcggcaccctcgatggcgccaacgtcgagatccgtgagcgcgtgggcgccgagaacttcttcctgttcggcatgaccgagccggaagtctccgcgctgtacgccaagggctacgacaccaagggtctgtcccgcgagtactacgagaaggacccgcagctcaaggccgccatcgatatggttgccgacggcaccttctccgacggcgacaaggacacctacaaggacctcgtcaacgattggctgaacaaggattacttcatgacgctcgccgacttccgcgcgtacatggacatccaggcccagatcgaggaaacctaccgcgatccgatgaagtggagccgcatggccgtgctcaacgtggccaactccggctacttcagctccgaccgctccatcgaggattacctcgagcgcatctggcacaccggtccgctcaagtgattatggagcggtcatgaaacgtcgccggcatcgccgacgcacgcatgatcgcttccgctccgtccgtttcgcaatgggcggataagtgatgacgacgaaggcccttgggattttccaagggccttttcgtatgtttttcgcatgtccgattgcgtatgccggtagtgcccgaacgtacgtgccgaacgtacgtggcaatacagcgacagtacgacggaaggccgcaagccaatcgcaatcgaaaaagcaaaagaaaaaccctgtatcgcaagatacagggcgaagcaacaaacccaacgcggcataggtgcgccggaaaaggcgaaatcaggcggcttccggctcagcggcaggagcggcggcagtggcgtcggcctccggctcggcgtccttggtcaggcccaggtcgaccggcgaggagctgttctcccacggttcctcccacgggtcatagtcgggattctgctgcttgtagatgtacagaccgacgacgccagcaagcaaagctccgaagagcagtgcgaagaacttccaaccgttagaagacttattctccatgacggctcctttcaaggtttccaaacactggctgacctgctcgttcaagccagctctgttccctatcttaattcgtggaatgtgtcgattgggtggatttacgcgccggaaaataccgcatgtgccggtagtgttgagctatggcataccaacgattcagtctgtttcccgattccccatcgttcaaggatttgttctccgcccgatcgctgcgataccggtggcgcaacggcgacccggtcatcaccaccgccatcatggcgatctgcatcgtggtgtgggccatcgaagcggtcctcttcctcgtctggcccgaaggcggcaacgcgttcgtgaacgccggcatgctgctgcccgccacggccgtccggcacccgtggaccttcatcacctcgatgttcctgcaccagccgacctcgctgtggcacatcctgttcaacatgcttactttgtggtgcgtggggcccgtgctggaacgcatgatggggcattggccgtacctcgcgctgtacgtgctgtccggattgggcggcggcgccggactgatggtgtgggccgtgtgctcgccgtcgggatggatgaccgccgcatatggcgcgtccggcgcgctgttcggcctgttcgccgcgattctggtggtgtacaggagaataggcatcgatattcgttcgatgctgatttggatgctgatcaacttcctgatgccggtgatcacgccgggcattgcatggcaagcgcatgtcggcggattcatcgtcggcggcgtgcttgcgtggctgctggtcaccggcctgcatgcgttccgcggcaaaagcctgacgtggcgcaccacggtgtacggcatcacggtgttcgtggtggtcgtggcgatcatcgtgggatgcaacgccggcaatccgctgatgcatatgtcacttctgtaccagtaatgcgggaactacacacatgtagttttccacatccgtggataactttgtggataagtgaggtcaaacctgtgggtaagtcggggataacgtggtggattatccacaaggatattcacaaaatggcggaacataaggaatttcctatgtgaaaattgtggataaccgatatccacaccccacaaaaatggggaaaatcgccgccggtatttcgtggtgcgacgttgactcaggcacaaaatatgggcgttatccacattcatccacatttgtccacttgttatccacaggaaagataagatgacgaaggcaatcgacaaggacgcaataccgatgcgccacggacgcaggatacgcgtgcgacgatatgcgtgcgacatggcagatacttgcgaagaaggggagaggaaccatgagtgacggaccactgctcaacgacgtgacgcgcgccttcgccgaggcgcatcgcaatgaagacgtgcgtgacctggcgctcaaaaccaaacggacggcggacctcgacctgccggccgcgctcgaccagatcgcgggctggcaaatcgcccgcaacaaactgccgcaatgggccgcctgcgcggatatcgtctatcccgcgcatatttccatggaacagtgctcatcgcagttcacagcgcaatacaaggccgaaatcgcccggcgtctgttgcgatctctgccgcaatcggcgggacagacggctaacgacgtgaccatgacggacctgacaggcggattcggcgtcgatttctcatatctcgcccgcggattcggtcacgccacgtacgtggaacgccaatcgcatctatgcgaactggccgcgcacaatatggcggcgctgggcctcacgcaagcacaggtggtgtgcggcgacggcgtcgaatacctacgtgcgatggagccggcgcagctgatctacatcgacccggcccgccgcgacgagcacggcgcccgcacctacgcgatcgaggactgcacgcccgacgtgctggcgctgcgcgatctgctgctggctaaggcacgatatgtgatgatcaaactgtcgccgatgctcgactggcgcaaggcggtcgacgatttcgcgggcactgtggccgaagtgcacatcgtctccaccggcaacgaatgcaaggaactgctgctggtgctggacggcaaggctgccggggcaacgtccgatgccgcagcggcagacacgcgcgcgccgcacgtgtactgcgtgaacgacgatcagcggctcgactacgatgcggccgcctatacgcgcggcctgcgcatcggggacgcgccgctgccgcacgagctgcgttacctgtacgagccgaacgcgtcgatcatgaaggccggctgcttcgacgtggtggaagcgcgattcggggcggtgcagatcggcccgagcagccacctgttcgtatcggacgagccggtcgatggttttccggggcgcggttttgcgatcgaaacgatcggcggtatgggtaagaaggagctgaagcgattgctgtccggcttggaccgtgccaacatcgccgtgcgtaatttcccactcaccgcgccgcaattgcgcaagaaactcaagctcgccgacggcggcgacgcctacctgttcggcaccaccatgcaaggcggcgaccacgtgctgattcggacggcgaaaatcagcagataatcggcgggtaagcggcggctttccactcgacaggaaaccgcttttcctaaagctgaagcggggcgatgcagacgcggtaagtaaagtggttgaagcggataaaagagacgccggatcgcaatggacccggcgtctcttacataagcttcgatgggataggtgaaacggagaaaaccgactcagcgccaccacatggtcataatgaaaccgaccatgatgattgcgaacgcgatggccaggttccaagcgccgatgtgcggaatcggataatcggtggtcaggtagtagaccacggcccacaccagaccgatgatcatcagcgcgcagaacagcggcacgaaccagcgcgggttggacttggtgcccttgatgctttcctccacacggcgggtgttctccgcctgacggttcatcatgcgttgcatctgcggtgacagcgaatccttatcaacggtggcgttcagcaccgcttcgacacggtccataggaatatcgagatcgtcatcgtcggactggtcctcgtcaacggaagtcttgtcgacgacatcttcggtggtttcctcgacggcagcggtgtcgtcggcggactgcagatccttctggtcatccgcggtggtttcgtgcagctcttcgtcagccatcagcatagtctcctttaataggctaaaagtcataatagtgggtagactcgaaagcggcgaacccacggcgtaaaactgttcaaaatcaggacaattgttcagtgaaacccggcggattcaggcaggtttggaaaggcgcgtatggcgaagcataccggaaagcacagcgcgaaacggtcgaaggcggccggcgtcgcggcgttcctcgtgctgctgttctccggattcctgctgtccaccaacctgcgcgtcaaccgttccgtggtggtcagcaacgataccgccgaactcgtggaacagcgcgtgaaaaaagtgaactcgctacggtccgaaatcgatgcgctgagcaccagagtcaacgatctgagcaaaacactcgacagccagaacgccgacggatcgcaagacagcgaaagcgccggcaacggcaccatgctccccgccgtggaaggcccgggactggtggtgacgctcgacgattcgccgctatgggagaacatggtcgacgccaacggatccagcgccaacatcaacgattacgtggtgcaccagcaggacatcgaagccgtggtcaacgcgctgtgggcgggaggcgccgaatccatgcagatcatggaccagcgcgtattgttcaactccgccgtgcgctgctccggcaacgtgctgctgctgcaaggcaagaagtattcgccgccgttcaaaatctcggcgatcggaccagtggagggcatgagaaaagcgctcgacgattccgaggaagtgtccatctacaagcagtacgtgagcgcgttcggcctgggatggcaggtcgacgagaaaacgaaactgcatttcgacgcgaccgacgcgttgcagcagccgttgcagtatgcgaaagcgctcgaaaacgacaagaacggcgaatcgcaagaggggaaataacagtcgatgaaacatgtgacaagccgtggcggacgcaccaaaagcgcgctgtggacgatactcggcatcctcgccgaactcatgctgaccgccgccgccatctgcgcgctgtacatcgcatggcagatgtggtggacgggcgtgcagtcggagcataaccagatcgaaacccgccaatccgtatcctggtctgatccaggaaagtccggcaacgtcaccgtggcgaaggcacagcagggtgacccgcctgtacagccgcaaagcgccacggaaggcgaactcatcgcccaaatctacataccgcgattcggcagccaatggcagcgcaacctggtggaaggcacggacctgacacagctcaacaagcacggcctcggccactacacggattcgcagatgcccggccaggtcggcaacttcgccttcgccggccaccgcaacggctacgggcagccgctcggcgacgtcgacaaactgcaggaaggcgacccgatcatcgtccgcacgcaggattactggtacgtgtaccactacaccagctacaaaatcgtgctgccgacacagaccgaagtggtggcggccaaccccgaaaaccccggcgcagcaccgaccaaacgcatgctgaccatgaccacctgcgaaccgaaatactccacgccgacgcaccgctggatcagctacgccgaattctcctactgggcgaaggtctccgacggcatcccacaggaactggcctcccaaaacgccaacggcacagtcaaattcgtcaacaacgaacagtcgtcgttcctgtcgtcgatcgatacgctgaaaccgtggatcttcggcgcgctcgccgcatacgtgatcatatttatttccgccgccatcgcctggcgatggccgtatctcgccgacgtgcgcgccggaagacgaaagaaggccgatttcagcctgtacggcagcctggtgcgactgcagccgggcgtgctgccgatccgtctgctgctggtgctgctgctggttttcgcagcggccgcatcgtgcttcgaatggctgttcccgtgggccgcgtcgactattccgatgttgcaggagatgtcgaactacacggccatctaaaggctgccgctgcgtgagacgcggacgttgctgcggcacggaacgcacgtacactgctgttcaaacgttgattggagcatgatgaccgattccgcacgcattctggtggtagataattacgattcgttcgtctatacgatcgtcggctatctcaagacgctcggcgccacggtgactgtggtgcgcaacgacgcgatcgacccgtcccagccgggcgtgatcgacgaatacgacggcgtgctgatttctcccggccccggcgctccggccgaatccggcgccagcgaggacatgatccgcctgtgcgcgaagctcgacaagccgatgttcggcgtatgcctcggcatgcaggcgctcgccgaagtgttcggagccatcgtgagccacgcgccgaccatcatgcatggcaaaaccagccaggttgagcatatcgacgatgagatcttcgacggcgtggccaatccgatgaccgccacgcgctaccattccctggcagtggaaccggagtccgtgccggacgatctggtggtgaccgcgtggacgcaggacgaccacatcgtgcagggcatcaagcatcgcagcaagccgatgtatgcggtgcagttccatccggagtccgtgatgacccaggacggctaccgtctgctggccaactggctgaaggtgtgcgggcaggattccgcggttgagaagtcgattggattgcagcctaaggtgagcgagtagttttcttttttgagcttgctgaattgcgattttttgcgatgaatgagtgatgggtgatggctgctgtttggctcgcagcgttgcttgcttgcggcgccgctttgcttcccgcaggtcctgttcacgacacactcaaggccgttcggccaagcttacggtcgtgaacaggacctgcgggaagcaaagctcctttggctttttgtgctgcctttggctgcttttggttttttgagggaaagaagggggggggcgtcgagccgcttcctcccctgaattattagttgccttgctggttgttggtgttgccgttgttgttcgtgtcggtgttgttcgtgtcgctggacgatttcttggtggtcagcgtaatggtcgatccgctgtcggcctggctgccgccattcggcgacatcgacacgacggtcgcgtcatcatcctgtggcccgttgacacttacctggaatccggcggcctccaaaatgctctttgcttcggcaagtgtggagttggtaacaaacggcacgctcacctgctgcttgccggtggacacccaaatggtcaccgcggtgcccatttcgacggtgctgccggaacccggatcgatgcgggtgactgcaccggactgcaccgaatcggaatactcgctttcgatggtgatctgcgtcagaccagcctgcttgagctgcgcgatgaccgaatccttggactggcccaccagattgtccggaatcttggtcatgccggacgaaatgtacagcgtgatgatggtgcccttggtctgcttcgaattcgcggccggattggtgttcaccaccttgtctttctcgatggaggcactgtccacggtcatgacattgccgatcttgaagcctgccgcctcaagaatgcccttcgcttcctcctgcgtcttgccggacacgtcaggcacgctgaccgcctgcgggccggtggagaaccatatggagacggtggagcccttcgccaccttcttaccgcccttcgggttctgcttggtgatggtgcccttcggttggctggacgtggaatcgtcacgggcgtcaagcttcagaccaagggccttaagctgttcttccacacgcgcctgggaaatgttcgacgtgtcggtgaagtccggcacggacaccagatccgcagtgttcttatgcccgttcaacgcgaagaaaataccgatgacggccagcaaaacaacgatgctgccgattacggaagcgatgatgatctgcttcttcttgcgctcctgcgcggccttggcacgctgttccgcacgggtcttcgtttcgactccgccattcggattcggcacggcctcgaactggccggtgaccgggttgaacgcctgcgtcggcgcatccgtcgccggcgccatgggcacggtggcggcatccatttcggcctgcttgcgggccttcatgttggtcaggtcggtcaacgggttgaacgcggcagccatcggcacaccgccgttcatgaacgtcagcagatcgttcttgaactcggaagcggtggcgtaccggttctgccgatccttggccatcgccttcgcgcagatcgaatcccacatcttcggcaggctcggcacgatcgtgcttgggggagtggcgacttccgacacatgctggtaggcgatcgccaccgccgaatcgccggtgaacggcggccggccggtgagcatttcgtacagcacgcagccggcggaatacaggtcggaacgcatgtcgacgctttcgccgcgcgcctgctccggagacaggtattgcgcggtgccgacgacgccctgcgactgcgtcatcgtggccgcggaatcgtcgatcgcgcgggcgatgccgaagtccatgaccttgaccacgccctgctcggaaatcatgatgttgccgggcttgatgtcgcggtggatgatgcccatgcggtgcgagtattcgagcgcgttgagcacgcccatcatcacctgctcggcgtcgcgctggctcagcgcgccattcaccttgaggatgtcacgcagggtctgacccttgacgtactccatcaccagatacggcagatgctcgatctcgccggtttccgtggtgacggtttcctcgcccgaatcgtagatgttcacgatgttcgggttgttcatctgcgcgacggaatgggcttcacggcggaaacgctcaaggaagatgctgtcagtggcgaaatcggcgcgcatgatcttgacggcgacggtacgccccagacgcgtgtcggtcgccacatgcacttcggccatgccgccacggccgacgagttggccgagctgataacggcccccggccagagaggtaggcatgttgatgttcatccctgttccttccaatcattgctcacggagatatggggtttgctgaccacacgtcggggaagccttcctcccgaagagacgaccatcgtgtcggccagctgcgtctgctggtcgagcagacggcgttcgatgcgggacagggtgcgtgacaccaccagcgcgtccttcggacggtccagcgggtccttggccaacatcgacatgacgaattcacgcaactgcacatcgacggtgtcgggcagcggcggaaccggattattgacatgtgctgcggcgatgtcgaccggtgtggcgcccgtgaacggacggtgtccgcacaggccctcataggcgacgacgccaagcgaatagatatcggattgcggcgtggcatgcttgccctgcgcctgctccggggaaatgtactgcgcggtgcccacgaccatgccgtcctgcgtgatctgctcctgattggtggagtaggagacgccgaagtcggtgatcttcacctcgccggaatcggacaccatgatgttcgccggcttcacgtcacggtgaatcacgccatgggaatgcgcgacgaacaggccgcgtgcggtctgaatgaggatcggcagcagcttgatcgggtccatcgggccgttctgctcgtggtacaggtctgcaagcgacttgctcggcacgtattccatgatgaggaatccgatgccgtcatgctcgtaatattcgaacagcgcagcgatgttcggatgcgcaagattggcggaattatgggcttccgcgcgcagacgaagcagtttggcctcctgggtgacgcccaaatcgccacgtagcgccttgatggccaccggacgtccaagttggatgtcatagcctttccacacttcacccataccaccttgggccaggcgggaatccaacctgtagcgtcggtggatgagctgtccttcaaccagtttcattctgccagcgcctcctgcatcattgctttcataatcggtcctgccgcgaacgagccgtacaggtccacgttatgcaccacgaccgccaccgcgatcttcggatcgtccgccggtgcgaatccgatcacccagccgtcgatggacgtattgccgtttccaatctgcgcggtacccgtcttgacggccacctgcacgccgttgatggccagattcgtgttctccttggtgaccacggcctccatcatctgagtgagcttgttggccgtatccgcactgaacgcatgggacatgaccgtgggattggtctgcgaaatgaccgacaagtcggcggaacgcacgcggtcgaccagcgtgggctgcataagcttgccatcattggctatggcggcggccaccatagcattctgcaacggtgtcaccacggtgtctccctggccgatagacgccaatgcgagcttgtcgtcgttgatgtcggtggggaacttcgacgtgaccgacacccacggggttccggtgtaatcggaaccgtccacggtgatcgggctgtcaaaaccaagtttcttggccatggacgagacggcgttgtcgcccaacgacacgcccaactgggcgaacgcggtgttcgacgaatacgccagcgcgtcctccatggagatcttgccgtcagcgccgtcggcctgcggtacggcgttggtcagttgcgtgacggtgccgggaagcgtgtagcttgctcctgccggaatctgcgtatccggctggtattggccggtttccaaagccgcggcggccaccaccgttttgaacgtggaccccggaggatacagctgcgaagtggctcggttgagcatcggattggtggcgtcctgggacagcacgccgtagttgctgttcgcctggctcatgtcatggctggccagctggttcgggtcgtagctgggcgtgctgaccatggcgaggatacggccggttttcggctcgatggccactgcggcgccatccgtgctgccgaggctgttgtatgcggcctgctgaatcttcggatcgatggacgtttcgatattggcgcccttgttctcctgcccggtgaacagcgacttgaaccgctgccagagcagctgctccgactggcccgacagcagcgagctgcgggacgcttcgacgccgctccagccacgctggctgatggagaagaatccggtgaccggcgcatacagttcgccggcggaataggaacgctggtacgagaacgaatcgttggaaggatcggattttgcgatgaccgatccgtccgcggcgagaatggacccgcgcggtgcgccgtattcgtggtacagcgcgcggacgttacgtgcgtcgttggtgagctggttggctcggatggccatgatgatggtggtggacatgcccagaatgacgaacaaggccaccacgatggtgaacagctggcggagcgacttattcatgcgatgctccttgctggtcgatcgtcggcaggactccggttatcggaatcgtcggattggattgatcggtctggccggcttggctggttcgattggcgggcacggcatgacctgcttgcccggctgcgcccgcatggcttgcccgcacggccgggatggccgaagccttcgccgcacccgaacgcgtattgccggcgatttcggtacgacggttccgctcgcgttcgcgcaacaccctgacggcttcctgctggaatgtgtcgctgtcgatctcggattccggcctgttcgcggaattggagatgacgatcagcagcgcggccagcatgtagtttgcgatcagcgacgaaccgccggccgccatgtagggaagcgtcagaccggtcagcggaatgaccagcgtgataccaccgaccacggtgaacacctggaaggccatggtgaacaccaagccggacgcaagcagcttgccgaagccgtccttgattttcatcgcggtgatcatgccggctgcgatgatcagcagatacagcatgagaatggccatcaggccggtcaatcccagctcctcgcccaatgccgcgtaaatgtagtcggaatttgcgatcggggtgatcgacgggtggccctgaccgaggccggtgcccatcagaccgccggaagccaagccgaaaatgccggtgacgagctggtatgagccgccgtattccttgttgtattgagccgcggagaacgggtggagccaggcgtccacacgcgagccgacgtggctgaagatgcttgccgccgccaccgcgccggcggcgaaggcgatgaatccgatgacgatccagcttttacgcccggtggccacgtacagcatggacacgaacatggcgaagaacatcagtgacgtgcccagatcatgctgcaggaccagaacgcccatggagacgatccacaccacgatgatcggtcccatatccttgatgcgtggcagttggatgccgagaatcttctttccgccgacggcaagctggtcgcgatggtcgaacagatacgaagcgaagaagaacgccaggaacagtttggcgaattcgctcggctggaacgatcccaagccgggaatcttcacccagatgcgcgcgccgtactgttcggaaccgaccaccggcagcattggcgacagcaacagcacgatgccgatcaccatgctgacgtacgagaatcgccgcaatacgcggtaatccctcatgaacaccaccagcaggttggcaaacaccagtgcgatcgccaaccaaagcaactgtcggaacgccactgtggttttggtgtcttggtcgaggcgcgcgatcatcgtgacgccgatgcccgtcaataccatcacgcagcacatgaccgattggtcggcgtgcggctggaatcgcagcagcagaccccaggaggtcaggaataccgcgcccacgaaggcgagcatccacagatagtcctgcgggaagccgttcgtggtgcgttcaaacatctggaagaacgccaccgcgcacagcagcatgctgaacagcagcatgccaagctgtctcaagcgtgttgcgatcatgacttgtcaccgcccgacttgttggtctgcgcggcctgatcggcggcctttttcgccgcttcgtcctgctgcttctgcttggcggctgcttcgtccttcgccttctgctcggcttcggccttctcctgctgcttcgcctcttgcttgcgcttcgcatcgttcagctgctttttgatcagacgggtatggcttttcgcttcgccgtacgtgtcgaaggagatgccctggtcaagctgttcgcgccagcttggcggcagatcgctggtcttcatattggtgtcggtgacggcatgtgacagtttggcaccgaagatgctcgtcggcacgccttggaaaatcgccactttgccgttgttgtcgccgatgtagtacttggtttggctccaacggtaggtgcccacgcccacgccggcaacgccaagcagcaccagaatgatgatgagtatggtgatgatgcggttgcggaatttgcgcgaccgtttcgtcttacgttcctcgatatgttcgttgcgaatcgccttggcgacttccggatcgttcggatcggcggaaatacgcccgttgcgcttctgcacaatcggaatttccccggtatcggtattgacacggtcgccattgtcttcgcggaccgacgacggctgcgcgacgcgctgttccggctgtttcggctcctcgttggaatccttgccgctgcgcagggccgcggcgcgcgccgccggcgactgtttgccttcacgcagaggcggggcggaagcgaccggttcgttgacgatgtccgcgatggtttccaagcttgcgctggccgcgccgccgaccagcggcgtctgatgcggcaggtcgaacgcgtccgcgtcgagcgcgagcgtcgcgtcggcgatcaccgcggtgacgttgtcggtgctgcccgcacgcaacgccatcgatacgagccgctgcgcgcactcctcctgatcggcgcaggtggacagcacttcttcaagcgtggaatcctccagcacgccgcacaggccgtcggagcacagcagccaacggtcgctcggatgcgctttgcggatggcgatgtcagggcgcgaatcgatgtcgaaatcgcccagcacgcgcatcaccacattgcgttgcggatggttgcgcgcctcggcctcgctgatacggccggtgtcgatgagatgctgcacgtagctgtggtcgctggtcatgcggaccagatggccgtcgtgcagcagatacgcgcgggaatcgccgatatgcgccaatacccagcagccggcgaccagtgccacggacgtgacggtggtgcccatgccggcaagacgacgctcacgtttggctttgccgacgatcgcgtcgtgcgcggccatgacggaagtcgccatcatatgggagacgacctgcacgtcgccgtcaacattgtcctgttcgatgtgcgccagcgaccggatggcgatggtggaggcggtgtcgccgccggcatgcccgcccatgccgtcgcagatggcgatgagatgctcgccggcgaacgcggaatcctggttgttggaacgcacggtgcccacgtcggagacgacggtggaatacatgaacaattgttgcgaagcggtggaagtcggcaaaaacgtcacctcaattcgaaggtggtcgcaccgatgcgcacaggcacgcgcgcgccaagaatcatcggcgcgaccagacgctgatgattgacgacggtgccgttggtggatcccagatcctcgatggcccaacggccggtggcgggatcggtgtagacgcgcgcatggtgggaggaaacgaattcatcatccagcaccacggtgttcgaagcggaacggccaagtgtgatggtgttgccggccagagggacggaactgccggcaagggggccatcgataatgaccagcagagttggtttggcattggttgcggcgcttgccgaaggggctgcggcggctacgggcgcaggcgattcgacggccttgcgcgcggcacgctccttacgacgatgagcccgcgacttgcgcgggctgagcgtttcgatatccctgtacagcgaacgtaccgtacaggccacgaagatccagagcagtacgagaaacccgtacttgaggatcgcaaacgttaattcagtgagcataaaaggcggctctccgggttggggctgattactcctgctcctgcgaggaggcccagtacaggatgcgggttcggccgatggtgatcgtgttgccgtcgagcagcgttgccgcctcaacatgatggccttcgacgtacatgccgttggtggagttcaggtcgcgggcgatgacggtgttgccattgtcggtgacgtcgatctccatgtgacgacgggagatgccggggtcgtcgatgacgatgtcgcaatcggaaccgcggccgatgatggtcttttcctcggtgagcagatattggtgctcgccgatctccagcatcgggcaatcctcggtctgcgcgtcggtcgtgaccggcacggtgttgccctgcacggattcgctggaaagccggtaatcgcccttggaaagttcaagatcctcttcgaagatcaccacgaccgggccgacgaacgcgtagttctggctcttcgcatactgggtgaggttgtcggcaagttcattggcgagcgtttcggcgccccactcgacgatgttgttgaaatccggagtgctgagcttgaaacggtactcgttcggggctacggtgcgatcgcgcgtgacgggcatggcttctttgtcgatctcgcgttccagagcgctggaaaggtcgacgggcttcaggtctttagacccgaacttcgcgaaaaccccgttgacggcgccttccacgctcttctcaaatcggtcgagaacactcatacttgtccctttctgtccttgactatcctacgctgtagcctgccgagcgccaattcgaaggctacttgcttgcaaaaatttcatgtgaaggggattgcgtccggggtattggcggcgagtggtgcgtgacggtcggtagattggaaggtatgaatgatgcgattgatgagtttcctgggctgaaggcccgtaccttgcgattcacctgcggcgcgccacgttccgcccgcgcgatcggcgacggttcgcgtgcgctgttcctgcgttcggacggtccggaggacaccgtcacctccctgtggatgagcgtgatcggcagcgatggcgataccgacgagattctgcttgccgatccgcgtacgctgctggctgacgccgacgccgaggatgtgccggctgaggaaaaggcgcgccgcgaacgtgcgcgtgaaggtggttccggcatcgtcggctattcggtcgatgcagccggcaaccgcgtgacgttcaccatcaacggccagctgttcctgacggatatcgcggccggcgtgacgcgcggcatcgccatcgacgaaccggaattcaagccggtgctgaacccgcgcatcagccccgacggacgacacatcatgtatacgaccggcacgtatttggtggacgtcgatcttgcggacgtgtcggacacgacggacgcaggcgaagacgcgggcgatgcggtgtccatcgtcgcgtccgttccgcaagacgacgctgacgacgttgccgatacgcaggacggcacgaaagatgacgcgcaaagcgacgcggccgaatcgcaagcaggcgaatggaaaatcggtctcgccgaattcgccgcaggtgaggaaatggaccgttacgacggcttctggtggtcgcccgattccaagtatgtgctcttcgaaaccttcgacgcatcccacgaggagacctggtacatcgccgacccggccgatccgacgaaacccgcgcagggacgccgctatccgcaggcaatgacggccaacgccgacgtgcatctgacgctgctggaactcggctacgatacggacggctgctactacggcggcatcgcacacaacgtggaatgggaccgcgaatcgtacgaatacctggccgccgtcagctggaccgaaggccacgagccgctgctacttgtgcaggaccggcttcagcagcacgaccaggtgctcgccgtccacgtgggcgagcctatcgtgaccatgagcgcgccggaaaacggcttcaccgacgaggacggcagcgaagtggagaccttctccatcgccatccccgaatacgcgcccggcgaagaacccggcaccacgcgcgtgcttgaggaacatagcaacgactgctggctcgacctgatcgccggcacccccgcatacacgcctgacggcggtctcgtgtgcgcgatgaacgacatggacgccgacacgaaccgtctgaccgtggacggcacgccattcacacccaagggcctgcaggtgcgcgaagtgctcgacgtgaccgacgacgacgtgctgtgcgtggtgcagcgcacgccggaactgctgccggccgccgatctgccgttcctgtggcagtccaacgcggacgatcacgacgcccgcagcttcgacgtggtctcgatccgttacgacggcgactgggagccgctcacctacgttcccggacagtggacgatgagccgcgccggcgacggttgcgtggtgaccggccgtggcatggacgatgccgcgatgcagatgcagcattgcatgaacgtgcgcacgacggacggtgatggtgatggcgtcgacgccgccgacatgatgtcgatggtggtttcgccgatcgaaaaccacgccgaaacccccggtttcatgccgaacgtgcgattcgtccgcctcggcgaacgcgccctgtacgcggcggtcatcctgccgtcggcggacagcgcatacgcgcatgccgaccagttgccggtcctcatgaagccgtacggcggccccggtttccagcaggtcgtggaaagccaatccttctactgggatgcgcaatggtgggccgaccaaggctacatcgtggtcaccgccgacggtcgcggcaccaccggccgcggaccgaagtgggatcgcgcgatctacgaaaacatgaaagccgtgacgcttgaggaccaagtcgacgccgtgcatgcgctgccggacgcgatcgcctcgctcgccgccgaaaccggtgtctccatgccgaaacccgacctggacaaggtggcgatgatcggctggtcgtacggcggcttcctatccgcgctcgccgtgctggacgcgcccgacgcattcgccgcggcctgcgccggcgccccgccgaccgactggacgctgtacgacacgcattacaccgagcgctacctgggactcgacccggccacgtacgaacgtaacagcatcgtcgcggacgcgccgaaactcagtcgcccgcttatgctcatccacggtttcgccgacgacaatgtgacgatcgccaatagcctgcgattgagccaggcgctgatggcggccggcaggaagcacacgttcctgccgctcaacggcatcacgcacatgaccaacgacgagacggtggcgcgcaacctgttgctgctgcagcgcgacttcctcgccgacgcgctggcctgacggcgttccggtgaagccaccgtcctggtaaaaccatcgttccgataaagccgaagaaaaaaagaacgcgtccccctgcgattcgacggactgccaagtatccgtcgtgtcacagggagacgcatatcccttctcattagggaagataggacggtgacgggcacctctgcaagtaagggtgtaccacatctgtgtagcaccctttgaagtaccctttcgtttctcgcgaccgtcggagccggtcacgattcggggtgtccggcaaggggtggcagggtttcgggcaccggaatcggcagataggcgaacagcgtccattcgccgtcgtgaagcgtcgtttcgagtttgccgccatgcgattcgagctgtttgccgaaatacgcgaggccgtggcctcctggacgcatgccctccgtcgggaaggctctttcctggttgatctgcgtgatttcgacggcgttcggcttgagtatcaccgacaggtcggctttgctgccggactgggcatgacgcgcgatgttggcgtaggtctcgcgaagcagatcattggcgattccggccaggctcggggaggcgcttggcgcaccgcccgccacatggaggatcgaggtgatgtcgaagccgagcgcgcgtagacgccggtcgccgtcggccatcgtggctttgagcaggtcggagaaggccttgccgtccgcatcctcctcaaggacggtgacgtccatatccagttcgtcgatgacgcgatgcacgttggtcagggcggacaggatgtaatcgttgacctgcgtccatttgtcgagctcatcgcgtctttcgtccgcgttcttgccgtcgtcaccatccgtcgaggcgctgccatcgccatcgtctccgccggacaatgcatcgatgcgacgttgcgcgacgaaagccgcggcggacagatctcccgtcacggcgtcgtgtatggcttccgcgatgtggttgcggctttccatctcccgtaatcgcgtcttcgcctgctccgcctccgcgcggctggcggtcatggtcgcgttccatcgcaaaccgcatccgagcatcagtaccaggctgaccatggcgatgatggccacgggattgctgttgctcgtgccgaggaccagttgacggaacagctggtcgcctatggaataagcgagcagcagcagcgccacaaggttgttggtttcgtaggcgagcatgccgaacgtgtagaggattcccggcagcgaattgacgtcggctccgggtatgagccaaggtcccgactggctcatgatcagaaacagcagcgacatcgatttcggaaagaacggtgacagcagcagcaccgcgatttcgatgatggtccagacgatcgccgcgggattgtcggtcggggcgagcagcaggcagaacaggatccaccatacggtgatgaccacgatggttatgcggatcggatgccagagtttcggatggtcggcacgcatatggttgtgccaggagcggaaggcgcttacgggtctgggttttgtgggttcagcgtgcatgcgatctcacccacaatgccactgcctggcgtgccgtcttgcagttcagcttcttgagaatgccctgcatatgcttgcgcacggtgctttcggagatgtccagttgttcggcgatctccctgtccagcatgccgtcggcgcacagggagatgatttgctcctcgcgcacggtgagccgcggtgaggtctcctcctcgcgtctgatgcgcacgttggccagggcgggaggttcgaatccctccataacgttgcctccacagagccgctcgatggccttcgccagctgatcggaatcctccttgccgatcagtccctgcgctccggcttccatcagcctgctacggtagctgttgatggagaagctggtgatgcccagaatcggcaaatgcctgtccatgagacggatccgatggcagatggccggcccctgcaagccctccatggacatgtccaatacaagcaggttgagattgtcgtcgttcctctggcaacgttcgatcgcttcgtcgccggaagtggccgtccacaccacgtaggccgtggggaccttcgcttcgatgagaaggctcagcgattccaacgcgcgcggatcgttgtcgaccagcgccacacggtggactttgggtatgggagctgcggatttcgtgggattcatcgcatggctcactttccacacagccagtaaagcggcggcgggcagtcgatgatggcggatgcggttcccctcgccgcgtcggcgaagatggcagccttcccgttggaaggggccatcgttccggctggctgcatggtgcagagcatgacgaatgacacacagaatgacatgattttcataccgacattgtacgggggagcgcgtccacgagtgaggaggcgcgttcgatccgtggagccgaagcgtggggctctgaaggctgttcatgtgggattcgtatgatgaaagcatgactcttaggctgctcgacgaggcgaattacgacgccgaaatggaaagcaaggtgctgcccgcgctggacgcctgcatgacggaaggatggatggatccagccaccgttgactggaacggcgacgcgctgcccaaactggacgaacccggccggttgcactattgctgttacgacgcgcacaaattcgacgtgctgcgtgaggacggcgcttcgggcatcttccgtggcgtggtggtcatctcgcatggattcaccgaattcgcgcgaaaatacagcgagatggcatggtacttcctgctgtccggctattccgtatgcatcctcgaacaccgcgggcacggccattccgcacacgacgtgagcaatcccagcctggtgtggatcgacgattggcgtcggtacgtggccgatttcgcagccttcgccgacactgtgggccgcgaatacgcgtgcggcgagccactgaacctgtactgccattcgatgggcggcggcatcggcgcggccgtgatggaacactatccgagcctgttcgacaaggccgtgctgtccgcacccatgatcgcccccgtcgtcggcatgccgacatggatcgcacgcatcgctacaggcgcgttgtgcggcttgggattcggcaaagcgcgcgtattcggtcacaccgatttttcccccgaactcgatctcgacgagcataagggcgcgtccgaggcgcgcgttcgctggttccacaagcagcgcgtcgacgacgtggcatgccagaccaacgcggccaccttcgaatgggcgcatcaggcgatggcgctgtcccgcgccatactcaaaccggacatgtgcggcgcaatcgaaaccccgatgctgctgttccaagccggacgcgacatttgggtgctcaacggaccgcaggacgatttcgtggaacgcgtgcgcgaaggtggcggatcaatcgaaaaaatacggtacgggcaatcgctgcacgagatcttctccatgccgaacgaggtgcttggaccgtatctggacaagatcttcgatttcctcgccgcgcctgacgccagcctgtagaaacccgcatatccgcagaaacccgcgtattcgtagaaacccgtgtatggtgtgcgttggaagggaacgcgagagcaaaggagaacagcggccgatggcgggaaagacgttcgagcgcacgccgaaggatctgctcgtcggcatcgcgatgaccctgtgcggaggcgtgctgtggggcatcaacgccaccgtctccaaaatcctcatgggcacgtatcatgcctcgccgctgtggatcgcatgcgtgcgcgaactggcagccggcgtgcttttcctcacctgctcggccatcatgacgccgaaactgcttaccggcgcgctacgcgatcgcaaatcatatccgcggctgctggccaccgccatcatatgcgtgctgctggtgcaggtcgcctacctcgaatcgatcaactggaccaactctggcaccgcgaccgtgctgcaaagcctgaacctgctgttcgtcttgggggtcgtatgcctgcgcgggcggcgactgcccggcgtacgggaaggcatcggcgtggcgctcgccttcgcgggaaccgtgctgattgcgaccggcggcgacttcaccacgctgaaactgccgttggtcggcctgatttggggcgctatcaacgcggcgtccacggcggccatggtgtttcttccggtcaagctcatcgaacgttggggcaacttcaccgtcaacggcatcgcatttctgatttccgggcttgtgctgctgccgttcgtgcggccgtgggctacggcgccgcagttgtattggctgggtgtggggctgatggcgttcaccgtgatcggcggcacattcggcgcgttctggctgtacatggccggcgtggtgcgcgtcggttcgatgcgtgccaccatgctcggcaccagcgaaccggtgatggccacgatttccgcggtggcatggacggacgcggtgttcgaaccgaccgatttggttggattcgtgatgattctcatcatggtgtttttggtgcgctgagtgccgtgacgggcgttgcttttcgggcggcggcgtgcggacaaacaaaaaagccggacatccacttacgggcgtccggcttcgctttgcttagcgattaccgtgacttacgacgtgcgaatatgacgtacggcagctggaaaatcagccttcaatcgcaatctgatgcttggtctcaacctgctgctgcgcttcgggcttcggcatttccaggcacagggtgccgtccttgtagctggcgtgaatgtcggaatccttcacgtcctcgccaacgtagaagctacgagagcaagagccggcgtagcgttcgcgacgcagccagcggccgttgtcgtccttgtcctcgtgcgagctgttgcgatgcgcggaaacggtcagatagccgttctgcaggtccagcgaaatgtcgtccttcttgaagccaggcatgtcgatgtcgaccatgtagcccttgtcggtctcacgcacatcggtgctcatcatgcctgcggacatgttcggatcgcatgcggctgcgcggtccatgttgcgccaaccctcgaagaacggatcgtcgaacagatcggagaacatcgtgtcattcatcaaagccggaaacattgccataatcggtactccttaagcaaatgcgcgttctgtgcgcggagtaatgcggcttggcagccggccgtgcgattatcgctgcggcgtcaccatccagcgagatcggcgaccgggttcgttgccgcatccggaaccctcccgggctcctgaccttgacctttcacttcacccaactcttccgtgtcctgctcattccgcggttatgctcacagtgaaataccgggaaatgcttgcgattgcgtgcgcggaaaagtcgtacggcgaatttcgtttttcttcagaatcggacgcatgggattggtctgcaatgcgttacgtatctgtttttccaaccggtcacgtgaagtgtggttttgggtggctatgtgttcgattctgccgaattggttattcggattgtgttttctgggaatcggacatttgtggtgctggttttgggtttggatgtccgtttgtctgtttctgctgagatagctgggctttcggcgcatttttagtacttttttgtcacatttcatacgttttggataaagcaaaagggctggaatcgttggattccagcccttttcggcccgtgcgagcggggggagttgaacccccacgagcatacactcactgccacctgaagacagcgcgtctaccattccgccacgctcgcagacaatcgactaatttacacctttactatctgtggcacaaatcggcgtgtcgcaccgccgtattcgcaaagcgaatgcacaaagcggtgcgacgcgaggagggaggaggccctgtggacctccagacgatggagccatcctttgttcaaaaagccgcgtttgcgtagcaaatgctcaagccccgcgacttccatccagctcctctggctcagcccttcgaaccgttctcgtagaacttcgcgagtgtctcgtcacggaattcgttgaaatagccaccgtcgattgattcgcggatatcgtcgagcagcttcacgaagaagtgctcgttgtgaatcgtggccaacgtgaaaccgttgaattcgcgggcgcgcagcgcgtggtccacgtatgcgcgcgaatagtgcgtgcaggtgtagcagtcgcagtcctcctcaagcggaccgaaatcgtgcttgaactgcgcgcgcttgatgttgtagcggccgtggcgcgtgaagatcgcaccattgcggccgcaacgcgcgggggccacgcagtcgaacgtatcgccgccgttctccacgcaggcgaagatgtcgtccaccgcggcgatgccgagcacgtgtcgcggacggctttccggcatcgcgtcacagatccaggcgcaggtgtcgccgatgatgcgcttctcgatcgcgccgccgatgccgacgccgtcgaaatcgagcgaagcgatctgctcggccgcatgccggcgcagatcctcgtaattcgcgccctgcaccacgccatagagcgcctgatacggcttgccgagacgttcctcggtaagccgcttgtgctcggccacgcaacgttgcgcccagcggtaggtgcgttccacggaacgttcctggtagccgcgggtgttcatcagcgtggtcagctcgtcgaaagcgaacatgatgtcggcgccgatcttgtgctggatgcccatggagatttcggcggagaaccggtgcagcgagccgttgagcggcgacttgaacgtcacaccgtcctcgtccacgaacgcgagccgctccttgccttccgcgatcacgtcgtccgatttcatgccggtgacgtccatggcgagcgtcttcttgaagcccgcgccgagtgacagcacctggaatccgccggaatcggtgaacgtcggaccgttccagttcatgaatttggcgagtccgccggcttcgtcgagcacctgttctccgggtcgttcatacaggtggaacgcgttggacagcaggcattgcgcgccaagatccttcatggtttcgggcagcacggccttcatcgcggcctgcgtggccaccggcacgaacgccggggtgtggatgtcgccgtggggggtgtggatgatgccggtgcgtccgtatcgcgcgccgccgcggcccttgccatcggccgcatctggcaggcgggttttctgctcgaagtagaacgcgtcgcggcggccgggcttgccgggttccgcgccgcggggatgctcaataaggttttcggtcgatgccgcgctggtcgtgttgcctgctgcgtcgtgcgttgcgcgggctgccgcgttggccgctgaggtctcgtgcgccaccgcgccggtctgtggttcgttcaagcttgtcatgctctcaactgtatgcgatagcgccgattgccgcggtggcgccatcggcggtcgacggtggcatcgtatggagcaaactgccaagcgattcgattgctactttcaacaaacattcaggaaacttccagagcaggtatctttactcttagatagcagttcgagcggcacgattgctgatcatgttgaatgccgcgagacgaataaggagcaacaatggctgaagataatagcggtcagaacatcgcccagccgcaggatggcacgcagcagaccgcgccgcagacgccgagcgagaacgtcgccgacgaagcacagacttccgttaccgaaccgattgcagtgccgaacgcgggcgagcagcccaccaccgcccttcctaccgtggacgcggcggatggcacggcaggcaataccgctgacgatacgccggattatgcttccgctgccggtgaacgcacggtgatcaacaacgcgacgcaggatgcgccgaccgaacagtaccgtccggcgcccgaatacggcgcgtacggtccggtgccgacgccgccggctggcgatgccagcggccagaccgtccagcaaccgcagtacggcgcgcagcagcagggccagccgcaggacaaccgtccgtcgttcttcggcgctttcggcaacccgtatacgaccggcaatcagcggaacaatggcaatccgttcggcaatccatttggcggctcgtccgcgcagaacggcgcgcagcagaacaatcagcagcagccgcagtacggcgcgaacatgccccctgcgggaccgggcaaccgcaatccgttcggcgctccggggcagggcttcccgaaccagccgaaccagccgaaccagccgaaccagacgccggtcgttgccaagcaaaagtccggcatgaccagccatgtggtcaccgccgttgtggccgcactggtgtccggcgcgctgtgcctcggcgtcggcttcaccgcgatcaccaacggttgggtgcatgtgccgacctccagctcgctgtccgacgtcaagtccaacacgtccggttccggttccgccaaggcgaagtccggtacggcggtcgattggaccgcggtggccaaggaagtgtccgattccgtggtggccatcgacgtggcgaccagcgacggcgaagccaagggctccggcgtggtgatcagcgacaagggctatatcgccaccaataaccacgtgatttccggcgcgcagcagattcaggtgacgctcgccagcggcgccgtctattccgcgaaggtggtcggcaccgacaccaccaccgatttggccgtgatcaagctcgacaatccgccgagcgatctgaaagtcgcggaattcgccgattccgacaatctcgccgtcggcgaggccgtcatggcgatcggcaatccgctcggctacgacgacaccgccaccaccggcatcgtgtccgcgctcaaccgcccggtgaccgtgaccgatgacgacaacaacgccatcgtcaccaacgccgtgcagatcgacgcggccatcaacccgggcaactccggcggcccgacctttaatgcggccggccaggtgatcggcatcaactcgtccatcgcctccactgcgagctcgtccggtactgccggttcgattggtattggcttcgccatcccgtcgaaccttgtcaagcgcgtggccaacgaaatcatcgacaatggttccgtgaagcatgtggtgctcggtatcaccatcaaaagcgctacggtcgaagccgacggtgtgacccgtggctgcgcccaggtgcaggccgtgaccgacggtggcccggcgtccaaggccggcgtgaaggccggcgactccatcgtggcgttcaacggaaaggcagtgaacaacaactactcgctgctcggttacgtgcgcgcctccgccatgggagacaaggtgaagctgaccgttgtgcgcggcggcaacaccatggatctcgaagtgacgctcgaccaggaagagaccaagacgaactcctccaacaagcaggaacagcgtcagcagaacaacggcaacgacgataacggcaacggccagaatggcggcagccagaacggccagaatggcggtaacggcaacaacggcgacggcggtggcctgttcgatccgttcggtctgtggtaaagccggatgcgcggcatcgtacggcaacgtacggtgtgcggcgttcatgccgacagcgatacgggtggctgccacccgataggctgacggcgaagtcacaaccgcaatccgcgtaatcgcggaaaacgctgaacaagccgaaaaacggcggaaaacaagggctgtgcgagcaatcgcacggcccttttcgtatgcgcggaacacgcgcgacgaacggaagcacacgcaaacggccgcggcaatcgcaatgctctgttatgctggaaatatctttttacgccgtgtatcgatggtccgcgcaggcgggacgccgatgggttaacaaggcgtccgatacgagcgtaaggagattctcatgcgtagaatcatttccatttgcaaagaagttccgctgctgccgatcgccatcattgccgcgattccgttggcattgctgggttcgtggcgtccgtgggaggccgctggcgtttcgctgactttcggaccgttcaatccgggcgtcggacagtggatcgtgatcgcgctggtcgtgtacacgattgtggtgacggtgatcggcatgattgacgatttgcggcacggtcacgtcggtgtggatctgcttgcggttattgcgatcgcgtcgacggtggcggtgcaggaatactgggctgcgtgggccgtggtgctgatgatttcctccggcgaggcgattgaggaattcgcacagtcgaaggcggaaagcaacctgaccgcgctggttgatgcagcaccgcggaccgctcatgtggtgaccttgccgggcgtgcgcggtcatgtgcatacgaccggtggcgagcatgcggcggacgtgacggagggtgggttccgcaaggttgccggggctggtgattccggtgttggcggttccgctgcttatgtgtccgtttctggtgaatcggacaaacctggtaccaagccttacgacgcggccggcgagcatttcgaaaccgttccggtcgaccaggtcaagcttggcgacgtgatcctcgtgctgccgggcgaaacggtgccggtcgacggcgaactgctgtcgggcgtcgccacgttggatctgagcaatatcaacggcgagccggtgccgcgcgaagtgtatgcgggcgcgcgcgtgctgtcgggtgcggtcaacggatcgaccgcgctgacgatgcgtgccacgcaattggcgcaggattcgcagtatcagaagatcctcgaactggtgtcttcggcgcagcaatcgcgcccgaccgtcgtcaaaaccgccgatgtgctggcggtgccgttcaccattctttcgctggcgatcgccggcatcgcgtgggccgtcgcaggcacgccattgcgattcgcgcaggtgctggttttggccacgccctgcccgctgctgatcgccgctcccgtcgcgtacgtggccggcaccggtcgccttgccaaggcgggcattcttatcaaagcgcaggacgtgctggaaaacttgggccgcgtatcgcatatcttcttcgacaaaaccggcacgcttaccgtcaagcagccgcaggtcgtgcgcgtcgagaagccgttcgaaaacagctcgccgtacgacgagaaccacattctgatgatggccggcgtggtggaaggctactcggtgcacattctgtcgaagggcatcgcggcggccgggcagaaggccatgcaggaactgtacgcgcgctatgagaacgggcagcggctgtgcgccgaacgcgatctgccggggcatggacgcgattaccccgtggtgaagaacatcgaggaacagtcgggcaagggtgtgtccggcgaggtgaacgggcatgccgtgcgcgtgggtcgtttcgcgtacgtgacggccgacgaggccggcttcacgcatgtgctgggcgcaggtgcggcggccggtattgcggctggtgctgtggccgatagcgcggttggcgattcggcgaccggtaccgctgccggcgcttccaagaagccggaggtgaattcgctgttcgccccgctcgagccggacgaaatggccgcgtacgtggcgatcgacggcaagctcgccgcgcgcatcgtgctgcgtgacgtgccgcgcgaaaacgcgaaatcgtcccttgaaaaactgcaccggctcggcgtgaagaaactgtccatgctcaccggcgacaaggaggcttccgcacgcatcatcgcgggcgaggtcggcatcgacgacgtgcaatccgaactcttccccgaaggcaaggtcgcggccgtcaagaacgccacggaagacgcgcaccaaaaccagccggcgtgggacaaggtcgtacagcgcgtggtcggcgaatccatgacccgacaggtgacgatgatggtcggcgacggcgtgaacgatgcccctgtactggcggttgcggacatcggtatggccatgaccgacggcacgtccaccgccgcgtccgaatcggcgcaggtggtcattatgaacgacgacatcgcctccgtgccgcgcgccatcgccatcgcccgccgcacgaagaaagtgatgctgcaggcggtgctggttggccttggattggcgattatcggcatggtcgcggccgcgttcaacctcattccggtggtcgtcggcgcgttcatgcaggaagcgatcgacgtggtcagcatcctgtgggcgctcaccgccctgctcgaccgcgagtagcgccggttgcggcgacgagccgtgcggaggctgaaccgcgttgcgccgtgctacatcgagctgggcgagatttcgccagcgatgttccggcgcatccacgtgccgaaatcggccgcgtccacgccctgcgacagcaggaacatgatcttcgcgtatgcggcttccagcgtcatgtcgcccgatccgatcgcaccggcgcgggcgatcgcgtcgcccgtctcgtaatggccgagcagcacttccgcctgctggcattgcgatgcgatgacgacaggcacgccgtcatgcagcacgtcggcgatcacgtcggtcagtcctggctcgtcgctcggcacattgccaacgccgtacgcgcgcaacagcaccgcttccggacgagggtcgagcatcgcggccaatcgcgcggcggaaatgccgggagccatgtcgatcacggccacatcgtgacgggagtagggcagcggcgacgcccaaccgcaaccggagccggccgaatcgcccgcataccaatgccacggcgtgccggtacgtgccagcgggccggtggacggcgctgagaacccttcgaacgcccagcttgacgatttgctcacacggttgccggcgaacagatgatggccgaagaacaggccgacgccatgaaaacgtccgctcatcgcggcgttcagcgcacccgtgacgttcgcggtggcatccgattcgattttgccgagcggatgctgcgaccccgtgaaaatcacaggcttgccgaaaccggtcagcgcgtaagacagcgcggcactcgaatagctcatcgtatcggtgccgtgcaacaccacaaatgcgtcggcgtcatcgcggtgcgcgcgcaggtcgtccgccatcgtctgccaattgtcgggcgtcgcgttcgacgaatcgatcagcgggtccagctcggtgaacgagaacaagctcgggtccagatgcgcgtcctcaatcagccggcgcagccagccgcgcatatcggcgcccggaaccagaccgttcggtgactcgaccataccgatggtgccgccggtatacgtgatgtgaatgcgcatatgcccaccctcttacgataaggaccttctttagtgagggaccgattgtgatcttctgcgattgtacgttctcctgcgccggcacatgggccgggctgcgcgttgcgaggcaagtaagggaatcgcaagaaagtgccgtatgccccctgttggaaatgcagggaatatattaggctggaacatatgagcgaaaccaacgaacttcgtattgctgtaatcggcgccggccccgcaggcgtctactcttccgatattttcctgcgccagctgggcaagctcggcgaagagctgggactgggcaccaaggcccgcatcgacctgttcgaaaagctgccggtgccgttcggcctggtgcgctacggcgtggcccccgaccacccttccatcaaattcatcgcatccgctctcgagaagacgctcgacaacccagacatccacctgtactgcgacgtggaattcggcaaggacgtgacgcttgacgagctgctggaacgttacgacgcggtgctgttcgccactggtgccgtcgaagacaagccgctcggcctgccgggcgccgacttggacggcgtgtacggtgccgccaagttcgtggaatggtacgacggttacccgaccggcgcccgcgaatggccgctcgatgccgaggaagtcgctgtgatcggcggcggcaacgtggccatggacgtggcgcgcgagctcatgcgcaacgccgacgatctcaaggccaaaaccgacattccggacaacgtgtacgagggcatcaaggccaacaaggcgaagaccctgcacctgttcatccgccgtggcgtggcccaggccaagttctccgtgcaggagctgcgcgaaatggagaagctgccgggcgtgcagctgatcatcaacgaagacgacttcgatctggacgacgacactatcgaggaggccggcaaggacaagctgacccgtcagatggtcgaggagctgttcaccatccgcgagatggccgaggacatggaagacgacggcgacaccgatttcgaaggcaatccggcggatcgcaagtactacatccacttcaattccgctccggtcgaagtgctgggcgaggacggcaaggtcaaggcgattcgcgtggagaagacgacgacttccgcggacggcaagatgactcgcaccggcgaattcgaagagtacccggtgcaggccgtgtatcacgcaatcggctacaagccggccaccgcgccgggcatcgcgtacgacgagcgtcgcgcgcacctggccaacgcgaacggcgacggccgcatcaccacggaggcctccggcgagggcgcgcaggtgcgtgagcgtctgtacgccaccggttgggccaagcgtggtccggtcggcctgatcggctccaccaagtccgacgcgctgctcatcgtcaccaacatgctggaggacctgtccaaggccgccgaaggcggtcgcgtggccgctgaccgcgatccggaatccatcgaccgtctgctggcttcccgcggtgtcaagccgatcgacttcgccggctggaagaaggtcgacgcgttcgaacgtgccgaaggcgcgaaggaaggccgcgagcacaagaaggtcatcgacccggagcagatgcgcgcgctggcgcatgcctgaatcgggccggctggaattagggtgggagtgctgacttcctgacaccctaactccaagccttttaacgcaatctagtaacgccctgcacgtccgattcctctgaatcggacgtgcagggcgttagtttttgccgctttagtggtcgattttcggcggactggtcgcgtagcgtgcgttttcgatcgcacaaccgcccgtttctccagaatcggacatacgcggtcgttttgacctattacccccgaagttcgggtccatgcgctaggctgaccccagtgaaacgcggtgcgcaatatcatcgcaaacggatgcgggcattgaaatctaaggttgtgaagtcggcatgaactttggaaaacacgtcaagcgcaaggcactgtactgctgttccgtgtccgtcgtgggcctgctgatcgcctgcctgatcggcttcgctatgggcgtgggtcttgtcgatgtgcatctcgaagaggaagcccacgcagcggcgtcctcgggaacgtcttcggaaacgtcctccacgtcgggcgcgcttaagaaaaacagcgcgtcgcaatcgcagacacaagccgtctcgtcgccgacgcaggtcgcgctggacggcatttccgcagtcgagggcagcgccacgatcacaacgcagggcttcacgctaagcgccgattcgcaggccgccgtgcagtctcaaatcgccactttcgaagccgacggatataccgcatcattcgtgctcgccgacatcacgaccggccgcacgatcgcatacaacgccgatgcacagatctattcgggcgccatacctgatatcgctgttctcaacgggcaccgtcgacctgaacagcgtggcccaatccgctgacgcgcagtccgccaccgtccaccagaaggtcgacgccgtcctgcgcaattccgacaacgcgtcttacgactggctgtacaaaacgtatggcctcgactgcttcaacacgtgggccgaacaggcgggcgcggcttccagaatgggtgatcgcggcgggtacctgttcacctccgcgcgcgacatggccaaactgtggaccgccggatacggtttcctgttcgccgggcaaacggcgggggtgcagaacatcacgcccgaatcgctgcaatggctgtccggagacatgacgaattcgctgaactcctgcatccacgcggcccttggcgatgcggacaccgtgtacacgaaggccggatggatcaacggcgaaggcggtttgtacgcgctgaacgatgccggactggtgatgtcgcagtcgggcacgtacgtgctggcggtgctgacgaacgcgtgcggccgcaacgatttgctgaccagcctgatcggcacgctcgacgcagtgcattcaggggatatgcgggggtaatacgtttcaagttggggtgactctcgccgtgccgcagataggtctatggccgatgctgtagcgtcgttgcgtggcatgtttctagatgttgcaaatccacccttcagcttgtatacagcaaaatcccagcctgaattcctaggctggtggccatgaacggcaaattgcaggtgcacggccattgcaatggcttgaaaacaacgcttttgttcgcgttgatgtggggcgtcatcatgctcatctggtgggcgaccggcgccagtcaaagcacgctcggctactacattctcatcggcctgggctccacgttcgtctcctactggttttccgacaaactggcgatcgccagcatgcacgctcgacaggtgagcgagcaggaagcccccgtactatacaagatcgtccgcgagctatcggcgaaggcaggcaagccgatgccgcgcatctacatcgcccccaccatgagccccaacgcgttcgcgacggggcgcaacgaacgacacgcggcggtctgctgcacgcaaggcatcctacagacacttaacgaacgtgagattcgcggcgtgctcggacacgaactcatgcacgtctacaaccacgacattctgacgtccgcaatcgcctccgccatggccaccgtcatctcgtacctcggctactcgctcatgtatttcggcggcggccgttcgcgtgacgaccgcgacgattcggcgtccggcggcttgggattgctgggtgtgctgctgagcacgattctggcgccgatcgcagcgtcgctgatacagatggcaatctcccgcacacgcgaatacgacgccgacgaagacggttccaagttgacggaggatccggaagcgctcgcttccgcgttgagcaagatttccggtggcgcagccgcgatgccgatggagaagaccgccggcacgcagtcggtggctgcgatgatgatcgccagtccgttttcggcggaaggtttctccaagctgttttctacgcacccgccgacctcggatcgcattgcgcggctgatgcagatggggcaggagatgcgtcagcagggcgtgcagtccggatatttggccggtggctatgccacgagcggcgttgcggcggcggatattcggcaaggcggacgttctgcgatggctggtgccggtgggccgcaatttggaacgcagtatggatccgcgcatgattcgggcggctcggctggcagatattctcgcgactattcgcagcggccgcgtggttgagtctccatgatattgcggaaaattggtatcgcatgtcggtctgtgtccgcatacgcatccgttgcgtgctagactaatggctcgtgcccaaaaggcacaccttgcggatgtagttcatcggtagaacgaaagcttcccaagctttaaaggcgggttcgactcccgtcatccgctccactcgaaacccttggaatcgttggaattccaagggttttctattgccataaaagacccgtgaagtcaacttcgcgtcgcgcaactgtcggttgcgtcgcaaaatttggttgcgaatcgcaatgcaaccgcaagatggtggcgtggaacgcgacgtttgtgacaagctgctgatgctttgcgacatgttcggtgtgacgttggatgatttggtcatgggcgacgtgtgcgcgtcggcgggccgtggaggtgcgggacgcgtgggctgtgtggatgcgggacgcatggacttggctgccgatacggctggtgtggcagcgtcggatggggtggttgactctgctgttggtgcggttccgggggtaatcgggttcgcggcatcgcaggttgcaggagtgtccgattctgcagaatcggacactcgtggagggcgatgggtaggctggagcccgtgaacacgaaccagaagtccccctccgattccggcgcaaaccaccccaccggcaactcctgcaatccgctactcggccatgccacatcacacgcggcgacactcatcggcctgttcgcaatcgtcctgtggggcttcatggccggcctcgtgcgactggtctccgaatcgttcggcgccacgctcggttcggcgctcatctacaccgtcggtggtgtcatgctgttcattgtgcgccgtccgaaaccaatccgcgaagcgccatgcaagtacctcatcgcaggcggactcatgttcatcgcatacgaggcgtcaatctcgctgtcgatcggcctggccacaacgaacgcgcaatccgtggaagtcagccttgtcaactacttgtggccgacgctgctggtgctgatgaccgcagcggtatcgcacaaacgtggtgcggtcgccaaagcgattcctggcgcggtgatcgcaaccatcggtgtggcgatggcggttggcggagaaagccttgatatgcaggaagcggtccacaatatcgccagtaaccccctaccgtatgtgctcgcgtttgttggcgcctttatttgggcgatttatgcgacttttacgccgtcgttgtccggcggttacgacggcacgacgattttcttctgctgtgtggccgttgtactgtggaccatccatttcgtttcgggagacggtttgccggacacggcgcccggcatcggtggatatgctgcgctgattgcgtgcgccgcttcgatttcgggcggctacgcgtgctggggatacggcatgttgcacggcagtatggaaacgcttgcgattggttcgtacgcgactccgctgttttccacggcttctagcacgcttctgttgggcgtggcgctgggcatgccgttctggatcggtgttgtgctggtggttgccggttctctgatcaacgtgtggtttgcacggtgcccctgagtgtccgtttctcccgaatcggacaacctggggtgaccggatgacgcgtgggtggctgattcgggggaatcggacacttgttggtgcgtgaggaggcgacatgtggggtagtggcggcgcagaggagcgccgggatggcgcagcggtacgtaagggaagtgactgggcaggacaatgccttacgcctccacgctagcttaggtttttgccggctggtcgatggtgacgaattcgtggctttgggttttcaggtcgtcgatgatggcgggcagcgcgttcacgtgtaccagccgaaaccgatctaaaccggctcaaaccagcccgttcaaatccgcctcgtcacatcaccttggtggactccagattgcggctcacccagttgttcaaccggatcaccggcttgcgcaacaccaatcccagcagcagcgaaggaatcaggaacaaggcgagatacaccatgtcaagcaggtactcattgccgtatgatccggccatcgcggcgtacatggcatcgatggcgtgcgggaatggtaggaacgggtagagcatttggaagaacttcggcagcgtctcgatagggaacgtaccgcccgaaccggcgacctgcatcaccagcagcaccacggccacggccttgccgatatcgccgaacgacacggtcagcgtatacacgatattcgagaacacgagcgcggcaagccaccccacggcaaggaactgcagcgcatgattcgcctgcacgccaaggaaatacgtgtcacccaggcaaaccagtgtgccctgcagcaacgcgagcagtgcgaagatcgcgtaccgtccgaaatactcgtggtcgagacgcagtccccaacgtgaggcgttccccgggccggacgggccggcgatgcgcggcagcgtgtcgcccaagcccagcacatgcgccttctcgcggtccgaaatcgtcactttcagcatggcgcacaggatgatcgcacccacccagattgacaggatcgtatagaacggcgccatggccgaaccgtagttcgcgatcgggtacaccgagacgcgatgcagtgcgacgggcgcggaaatcagcgtggacagtgtggacgcgttggcggtggccagtgcacgtagttcgtccgattcgcccgaatcggcgtcgttgtcaccgtcgccaccatcgctgttgccgtcaccggcgtttccgcccgtctccagcttcgtgatcagctccttcaccgtcgctgccgacgagtcgagtttcttcgcgatcgcgccgagcgtggaacggatggacgtcacattcgtccccacatcgcccgtcacatcgtccagaccgtcggcggtgccgctcagctgggtgatcatgctgtcggtttgggagatcagcgtgctgactgtggaggcgagcgcgtcgattttcggcttgacgttcgtggcgtaatcgtcgcgcacattgctgatcgactgcttcgcggaggtgatgcggttcaggatctccttgcgggagcgttccgcggctgcggtatcctgcgtgacctgcgtggaagcgtctttcagctgctgcgcgagcttctgcgaatcgcctttggcggcttccagcagcgtgatctcccggtcgatggcttccagcagcgcctgtttcgcggaatcactgtccggtagttgttccaccgattcgcgcatgtggttgaggcttgtgatgtacgtgtcgtacagcgattcgccgctggagatttgttcgctcaacgttgccaactggctggctgcggtgtctgagcccttgccgatcgcgtcgaacgccttgttcaccttggcagctacttggtcgaacgcgcctgacacctggtcgagcgcggtgttcaccgaggaggtgacgttcgcacctgcagaagtgagtgacgtggcacctgatttgccttgcttcaacgcgttctgggcctgtttgcccgccttggtcgccgaggcgagcagtttgcccgtggaatccacgatgtcgttcgccgagccgagcagctgcgaatacgacgtcacctgctgcgatgcgccgctcagcgtatccgccgtggtggtgagattgccgttgaggttgcgcatgtattcggccatttgcgggctttgcgaatagtgtaggatgcttgaggccaggtcgagtccgacttgcgcaatcgttttggcgaaggttttgtcgatcgtgttgaccacggttgtcgcgccctgatcggtgatatgcggggcgatcgggttgattttctcgttcagatagtacttgagctgcgcgtgtttgatgtcgggggagaacagcgtcatcatgtcggcgctgaaacctttcggaattacgatcgccgcatagtattcgccggatttcaccccgtcgattgccttgtcgcttttcacgaactgccagtccagctggtcgttggcgtgcagtgtgctgatgatggtttcgcccacgttgacgcgcaccggtatgagatccgacttgtaacccttgtcgttattggccacggcgaccttcaatgccttggtgttgccgtaggggtcccagctggccgcgatgttgaaccaggcgtacagcgccggcaccaccaccaggcccatcgagacgatcacggcgatcacgttgcgggtggcatggcacatgtcccgcttgaagatgccccagatcattttcactgttcgttcccctcctcacgcagactcctgccagcatttccgtccgtgtttccagccgcatactcagccgcatgtccggccgaaccaccatgcgcagcctcatacagtctcgtacgtacggcatgcatcggcttgtaatgcatgcccggccggaacagcaggttctcgtgcaggatcgcgctgcggaactcttccgcactcatcgcttcctcgcccagataattcgcataccgttcgcgcagatactccaccacgatgagatacgtgtcgatggcgatgatcgaaatgatccaaccgagcagcatggcgagcttcatgcgcgtgatgaatagcaatagcaggaacacgaacggcagtaccgccagcgcgaggaatccccaacgcaccaggcgcgggtacaggcggaagaaatgaatcgcccgtctgcgggcgagttcggggaactcctcggcgatctgctgcgcggtctcggtgagccgcaacggttccaccgtgccttcgttatgttcggtgatcatcagatcagtgtccgccagacggttgtcgaacaggcggttgaggttcaacgccagcttgcggaccaccaagccgatgaacagcgccacaggcagataccagaacagcgagagcatgtcgatccaataatggttggcatacatgccgccgatcggcccgcgcatcgcgttgatgccgtaggtgaacggtaggaacggtttcagacggcggaagaattccggcatcatctcgatggggtagaggcctgccgcgcccggaatctggatgatcaccagaatcacggcgacggccttgccgatatgccggaacgccacggcgagcgcgtaaatgatgttcacgtagacgaacgaggcgaaaatgccggcgaggatgaacaggaacggatgctcgcattggatgcccagcgcgagatcgccgatcgtggcgatgatcgcctgcaggaatccgaccgtgacgaacagcagccaacggcccatatagccttggcgtggcgtgtacatgcggatcttctcatcgcggtccacttcaagcttgtagatcgcgacgagcacgaatccgccgacccacagcgcaagattcgtgtagaacggcgtgaccgcggaaccatagtttttgaccgggtagaggacctgttcgtccaaatgcaccggctcgcccacgaacgagccgacctcgctcgcgtcaagtccgagcgcttgggaaagctgctggaacatcgccgaactgctcaacgcggccacatcggtgcgcgtggtgttgagctgtttggtgagattggcgagctgtgtctgcgtgccagcaatggtggtgttcgtttgggtcacggtgcgcgacaactggtcgagcagcccgttgccctgttccagcgtgctttgcagcgtggtaagcgtgccggacagcgacccattggccaggctgagtgtatcgagcccggtgttgagattcggcatgaccgtgccggtgatggtcgtgtgtgcgctcgccatcgacgccgtgccgttcttcgccagcgtggtgacatcgtcgttgaacccgttcgcggtgttcttccccgcgttgatcgcagccgtggtgtcctgatcgaaggcgtcgatgcgctgctgctggaacgtcagctgtttgcgggcttcggcgagctgcgcggaaagatccttatacgtttggctgttcggatccagctggctggcctgcaacgccttctccacgccgtcgagcacattgccggtggtggcgttgacgtgatgcatggtgctggacacttggtcgagcgcgtcctgcgtggtgttcagtccgctgagcacggtgccggtggcattgctcacgttgacctgcaggccggacagttgcgtgctgccgttgtcgagcgctccgaccagcgtgttcgagaatcgttcggtttgtgtgcgcgtctcgctcagcaagtcggacgccttgccgacggtgtcaagcgagttggtgatttccgaggcgagcgcgatgttggactgtttggccgaatcgatggtggtgagggccttgtcgagcgtggagcgggtgtcgcgcagctgctgttggacggtttcgagctggttgatggtgtcggtcagatcgttgacgacgtcgctttgcgcgcttttcacgctgccggtggtttctcccgctgcctccttcacttcctttgccacggcgtcggccacgctggaaacgaaagtggtgttgatctgctcgtcgatcgtggtcgcgcccgtatcggtgattttcggcgcgatcgcgttcagcttttcgttgatgtagtacgtgatcgacggtcggtcgcctttaccggtgacggtgccgattagtctggagctgaagtcttccggcagtacgatcgccgcatagtatttgccggattccacgccttcgatggcttgctgcttgggaacgaaacgccagccgagctgatggttcttcttaagctggttgacggtctgctggccagcgtcgagatggccgaccagcgtggaggttgtgcccttgtcctcgttcgccacagcgacttggatgttgcccgtgttcgcgtacgggtcccagttggcgaggatattgcaccatgcgtacagtgatgggatgatggccacacccagcgtgacgacgagcgccacggggttcttcagaatgcgtttcacgtctcgaaggaagatggcgaaaacctggtgcatcaagcctcctcgcgggtattggtcgcaacatctacgtgcggcggcatgcccgtgcgggaacacccggttgggctcttcgtcgcgcgatccggtggacattctatgacttccgatggaacgatcgcaatggtttcgccatgtttattggtcggtcccgcaagtgtcgggatatgagacgaaaacgctcggcatatggctctagtggggcgggcgacctggatatggagcggacggtcgggaaaacggaaaggaaagatggcgaatgttgtcacatgacaagtgggatagggttgggcgataatggaggcatgactattgcaacgccggaacgttatgcgcaaatgctggacgccgcacgccgcggcggttacgcctatcccgcgatcaatgtgaccagcacgcagaccctgaacgccgcactccagggtttcgccgaggcggaatccgatggcatcatccaagtctccgtaggtggcgccgcctacttctccgggcaacgcgtcaacgaccgcgttaccggctcgcttgccttcgcagccttcgcgcacgaagtcgcggcgaaataccccaacatcaccatcgccctgcacaccgaccactgcgccaaacagtatttggacgaatgggtgcgcctcttgctcgaccatgaagtcgaacaggtgaagcacggtcaggaaccgaccttccagtcacacatgtgggacggttccacagtgccgctggatgaaaacctcgacatcgcagaagaactgctcgacaaatcccaagccgcgcacaccgtgctggaaatcgaaatcggcgcggtcggtggcgaagaagacgggcacagcgccgaaatcaatgacaaactgtattccacgcccgcgcaaggcatcaccgtcgcgcaacgactcggcctcggcgagcgcggacgctacatggccgccttcaccttcggcaacgtgcacggcgcatacaaaccgggcgtggtgaaactgcgccccgaactgctcgacgaaatccagaccacggtcgcgctcgcgatcaaggccggcgaaatgcccgaccccgcgcactcgctggatgtcgctcccggtaagccgttcgccctggtgttccacggcggttccggctccgcgccggaggagatcgcgcaggccgtgagctacggcgtggtgaagatgaacatcgacaccgatacgcagtacgcattcagccgtgcggtggccggtcacatgttctccaactatgattcggtgctcaaaatcgacggtgaggtgggcaacaagaagctgtacgatccgcgatcctggggtcgtgaagctgaatccgcgatggccgcgcgtgtggtcgaagcatgcaagcagctcggcagtgccgggcgcgcgctgaactagccaacggtctttcgaactgttttcgggcgttttctggtctgtttttcggaccggttgcaatccgattacggtcggtccggagccgtgagcatccctcagacccggtagagggtgaagagtaacctttgtaaggctttaggcgcaaggcttaaggcagaatcgcgtacgcacggaggtgcaacaacatgcctggaattgttttgatcggtgcccagtggggagacgagggcaaaggtaaggcaacggatctgatcggcacgaaggtcgactacgtcgcccgtttcaacggcggcaataacgctggccatactgtggtcgtcggcgacgaatcgtacgcactgcacctgctgccgtccggcatcatcagccccaacaccacccccgtcatcggcaacggcgtcgtcgtcgatccggaagtgctgttccaggagatcgacggccttgaaagccgtggcgtggactgctcccgactgctggtgagcgaaagcgcgcacatcatcgccccgtaccaccgcgtgctcgacaaggtgaccgaacgcttcctcggcaagcacaagatcggcaccaccggccgtggcatcggcccggcatacgccgacaagatcaaccgcgtgggcatccgcgtgcacgacctgttcaacgcggagcatctgcatgacaaggtcgaggccagcctgcatcagaagaaccagatgctcgtcaagctgtacaaccgtcgcccgatcgacgtggacgagaccaccgacgagctgctcaagctcggcgaacgcctgaagccgtacgttgccaacacctccctggtgctcaacaaggcgctcgacgagggcaagaccgtgctgttcgaaggcggccaggccaccatgctcgacgtggaccacggcacctacccgttcgtgacttcctccaacccgaccgccggcggcgcctgcaccggcaccggcgttggcccgaccaagatcacccgcgtgatcggcgtctccaaggcgtatgtgacccgcgtgggcgaaggcccgttcccgaccgaactgttcggcgaggacggcgaatggctgcgcgcccaaggccacgagtacggcgtgaccaccggccgtccgcgtcgctgcggttggttcgacgcggtcgtcaaccgttacgcggcccaggtcaacggcctgaccgacatcgtgctcaccaagctcgacgtgctcaccggcctcaaggaaatcccgctgtgcgtggcgtacgacgtcaacggcgagcgtcgcgacgatatgccgaccgaccaggccgaattcgccgccgcgaagccgatttacgagtccatgccgggctgggacgaggacatttcccaggtccacgacttcaacgatctgccgaagacctgccaggattacgtcaagcgtcttgaggaactgtccggctgccgcatttccgtgatcggcaccggcccgcagcgcgaccacatcatccagatcaactcgctgatcgactgaagctgattcggctgattcgtcgatatgaacgtcggcaacgaacgtcaatgacaagtgccggtgggcctgtgcctgccggcactttgcgtatggtgcgtgcgatggcgttcgcgtatgacgcacaccgcatacacaccgacggggtgcgcggcggaggaacggaaaaggggagtgcgatgactgcaatgccgcctaacgacaggttcgacaggtttgacaggttcagcaaactggtcccgcgattcgaccacctgaaatggaagatggccgctgccggcattctcgtcggcctgatttccggcttcctcgtcgtcctctaccgtctcggcatcgaatacggcaccgacaccgcgcgctggatctacgcgcgcatccgcgaaaccccgtggctggtcgcaccgtgggcggtcgccgcaatcgcagccgcgctcgccatcgcatggatggtcaaaaaagagccgatggccggcggcagcggcattccgcaaaccaacggcgtggtgatctgcggcctgaaaatgcgatggcagacgattctgccggttcgcttcatcggaggcctgctcggatcgctcttcggcctctcgctcggccgcgaaggaccgtccatccaaatcggcgcatcgggcgcgcagttcctatcgcaccggctgcgcggcaagaaacgtgaggacatgcaggagcattatctggtcaccgccggtgccgcggccggcctgtccgccgcgttcagcgcaccgctgtccggcatgatgttcgctttggaaggggtgcatcgcagtttttcgcccgcgattctgatgggcgccaccgccgcgtccctgaccgccgatttcgtatcgaaatactgtttcggcctgcgtccggtgcttgacttcggcaccatcggccaactgccgctcggcgaatacgggtggctgattccgctgggattggtggccggtttggttggttcgctgatgaaccgttcgctgctcggcttccaaacgctgtacggcaagcttcccgcatggagccgccctttgatcgcgatcgcactcgcgctgccaatcggcatttggctgcctgacgtgctcggcggcggctcgaacctgatcgccatggccgagcatgcgcgcgtcggcttgggcatgctgtgcgtgctgttcgtggcgaaagtgctgttcacctccaccagcttcggttcaggcgctcccggcggcattttcatgccgattctcgcggttggctcactcgccggcggtatctgcggcgagacgttgcgccagttcggcaacctgccgtccgattccgtggcgattttcgcggtatgcgtgatgacgggcacgctggccgcgtccgtgaaaacaccgatcacgtcgattctgctggccgtggaaatgtccggcacattgacgcacatgctgccggtcgccgccgtcgcgttcatcgcattgctcgtctccgacctgctgcgtacgaaaccgatctacggcgagctgctggaacggtatatgcgcgcgcaaggcggcacgacggcaatcgccaatcgcatcgacaacggcatcatggaactgcctgtggaaatgggcgcgaccgcggacggcaagctgatgcgtgacgtgcgctggccgtacggctgtctggtgattggcctgcgtcgcggcgaacggcagatcgtgccgcatggcgatacgcggctgcgtgccggcgactatctggtcgtgctgttcagcggcgaggacgaaagcgacgcacggcatgcgatgcggcggctgtgcgacgtgtccgtctgacgcggccttactgtcttccataaccattcgtagacgtctagggccacccgaagttatccacagttatccaccgaatcggacatgttcgatgtttggttgcaatgcacgtgtagactcgtacaaggttaggaagacggcacctgcggccagctcgttgccgtatggctggggtggaacgacgctgtccgcggaaagccaagtacaaggggaacgtgatggaatcgcaagaacaacgggcggcagactcgccaaacgcgggtgatgagccgaatcccgccacacagtcgatcgacgtcgccgaagtggcgcgcgcggatgtgcgcccgtccggtgccgccgcatccaagcatccgccgcagattccgctcgcgccgatgaaacgcatgcaggcgcgattcaaccctcttgccgatggtctgatgtatctcgtggtgttcgtcggcggcttcgtcggcgtcggtttccgtcgcgccacggacctgctgctgccgtcggtgaacggttcgccgttcgtggtgggcacgttcgtgtcgaatatgctcgcctgcttcctgtttgcgatgctgaccgaatacatggcgaccgcgtcgtggctgcgccgcagggtacggcaggtcgtcagccgtggcgtcgggcttggtttgcttggcggactgtcgacgatgtccggcgtgatgttggaaaccatggaaggcatgcgcgagcagcgtttcggcagcgcgctcggctatcttgcgggaagtttcgccggcggtctgatcgcggccgcggttggcgtggcgctgatgcaggcgttgctggcgcgcggcacacgcaagcgggtccgtaacgcgatcgccgatgcctccacggcttccgtatcctcaatgtccgattcggacgcgtacggcatcgtgcaggacgtccagatgaccgacactgcagtatcggctacgcagagtgttacgcagacggtccccatggccgattcgggcgaatcggacgtgccggccgcgcaaaatgtgcagaacaacgtgccggacgcgcagggcgtgcgccacgtgaaggtggcggatgcggcgcattcggccgcgcaggccgcgttggaggccgcgcaggcggcacagcaggcggcccaggtcgcccagcaggtcgcgcagaccgggcaggtgccgaaaatcgaatcgcagccgcagtcatcgcaacccgtcgcacctctgcccagcttcgaacccaagccggtcaccgcggaaatcccgctcgtcgccgacccgaccacaggggaggtgcgctgatgacctggatgatctgcctgttcggcggcatcggcgccatggcccgttatgtgcttgacgtgtcgatccaacgcagctggaaccgtgacggcaaccacagcttccccctggccacgctcgtcatcaacggcgtcgcctccctgtgcgccggcatcgccatgatgtcgtactatgcgcagtcggttgatatgggcacggtaatgacgttcgttgtggggttcctcggcggattctcaacattctcgtcggcgatcaacgaggtgctgtcgctgattcgcaaacgccgtttcgccatggccctgggctatggcgctgccacggtcgcggtgccgctcgcctgcgtggcgctcggattcggcatcgccatgctgggcggccacgcatagctgtcaccggctcggccgcgcgtaattttcacgttacacgggcggtcatcgggtaacgttcaggaaatctgagcgcaaccgcgcgagctgtttcctctcctacgttgtgaaaacaacaagagaggaaaaacctatgacagccgtaacgtatctcacacggcatcgtcgaccgggaatcgtcatactctgttcgattgtcgccgttctctcgatgcttttcgtactccctcccgccatcgcgtccgccgccgattccggcgcgcaggccgtcgatgaatgcaatccgaccgccagcaacggctgcgtcaacggcatcctgcaggacgccgacaagaagccgatcgccgacgtcaccatcacgctgtccggcaaggcaaccgcggaaaccaaaaccgcggcggacggcaaatgggccttctccgttgccgatgacggcgattacaccgtcaccatcgacgcgtccgttgcgaaagagcacggcctgaaggcaagcagcgcgacggtgacaatcaggaaagccagcttcgacaagcagcgcggcgttgtccgattcgaccaggcgggcgattccgccggcagcggcacgtccggcacatccggatcgtccggctcggcaaacggcacgaaaggcgcgaccggcacatccggatcgacggcggccacgcaatcgccagtcaaaaaagacggctccaatgtcggcaaacgcatctggcagcaactgtattccggcattatcttcggcctgatgctgggcctcatgtccgtcggcatgaacctcgtctacggcaccaccggcctgcagtcgttctcacacggcgaacaggtgacgctcggcggcctcatggcatacgtcggcacgcagatgctgcacatgccgctcatcgcctccgccatcttcgccatcgtcatcggcgcgctgaccggcttcatccaaaacgaaatcgtttgggggccgctacgcagacgccacgtcggcaccatgcagcagatgatcgtcaccatcggcctgtccatggcgttgcagtacacgttccagttcttcttcggtggcgacatcaaaggcatcgtcaaatcggtgccggacagcttccagctcggaccgatcaccaccgacatgccgacgctggtctccgcgctcatcgccatctgcgtgatcgtcggcgtcaccctgttcctttacaagacgcgactcggccgcgccacacgagccgtgtccgacaacgcggcactcgccgcggcatccggcatcaacgtggaccaggtggtccgcgtggtctggatcctctcgtgcgcgatggcagccctgtccggcgtgctgctcggcgtctacctgaacggcatctcctggaacaccggcgcgaccctgatcctgctgatgttcgccgcggtgacgctcggcggcctcggcaccgctaatggcgcgttgatcggctcgctggtcatcggcatcgtggcggacatgagctcgctcgtcatccccaacgatatgcgttacgccagcgcgctggcaatcctcatcatcgttctgctggtgcgcccgcagggcatcttcggcaagcagcaaaggatgggctgatccatggacatcatgacaatcatctccaacgcggcgggcgaactgatcgccccgaccacagcggcgtacgtacttgccgccatcggtttgaacattcacttcggcatgacgggcctgatgaacatgggccaggctggtttcatgctcctcggcgcatacggattcgccatcacgcagtcgatgggctgcaacctgttcgcctccgtatgcgcggcgctcgcgctcgcggtcatctacgcgctgctgctgggcattccgacgctgaaactcggacccgactatctggccatggtcacattggccgccgcggaaatcatccgcatcatcggcagatcgacggccatgacgaacttcaccggcggttccgcgggcatctcgccgcaggacttcaccgagaaattcgaatcgctttcgccgctgccggacggttcgaccacgttcctgctgtggacgtacagcaacaacatcgccaactcctggtggctgcgcatcgtggcatgggttttggtggtgatcgcggcgctgctgtgctggcgctggttccactcgccgtggggccgcatgctcaaaggcatccgcgaggacgagaacgcgatccgttcgctcggcaagccggtgacgcgatacaagatggaatcgctgattctgggcggcctgttcggcgcgatcgccggcatcatcttcgtcctgccgcgttccgtacagcccgattcgctcggccgcaccgtcaccttctacgtgtggacgattctgctgctgggcggcgcggccacgattctcggcccggtgcttggctcctgcgtgctgtgggtgctgctcaccttcgtcaaggaggtcatgcgcaacaccgttcccgaaaccctcatctcttccaaccagatcgaagccctcggctgggtgatcgtcggcgtcgcgctgatgtgcctggtgatcttcaggccacaaggcctgttgggcgatcgaaaggagttggctttccatgcctgatacaacgaattctccgaccactggcgtgcagccggccacgcaacccgcaaccggcgtgcaacccgtatccggtgtgcagcccggcgtaccattccaggacctcaccaaatgggccaccaaagctccggaaggcgagaccctcatctccaccgcctatcgcgacaaagtcaccgacgatctgaaattcgtcgaaaacaagccgggtgtgcacaagcccgacccgatcctcgtggccgacaacgtgacccgcaaattcggcggcatgaccgccgtggacgtgagccacttcgaaatcgaacggcacggcatcaccgcgctgatcggaccgaacggcgccggcaaaaccacgttcttcaacctgatgaccggcttcgatacgccgaacaccggcacctggcagttcgacggcaaggacatggcccacgtgcagcccgaaaaagtggcgcgcatgggcatggtccgcaccttccagctgaccaaggtgatgagccgtctgaccgtgctcgacaacatgctcctcggtgcccccgtgcagccgggcgaaggcatgttccgcgcgctgttccccggcatgtggaggaagcaggagcaggcgaacatcgaaaaagccgaggcgctgctggaacgcttcctgctgatcaaaaagaaggacgattacgccggcgcgctttccggcggccaacgcaagctgctggaaatggcacgagcgctgatgtccgacccgaaactggtcatgctggacgagccgatggccggcgtgaaccccgcgctgaaacagtcgctgctcgaccacatcatggcgttgcgcgaggaaggcaccacagtgctgttcgtcgaacacgacatcaacatggtgagacacatcgccgactgggtcaccgtgatggcggaaggcaagatcgtggccgaaggccaaccgaagagcgtgatgaacgatccggccgtgatcgacgcatacctgggcgcccacgcgaacgtggacctgggcgacgattccgtgctggaagacctgaaggaggcctgaaatgagcgacatcgcaagcgtggccgacgagccgctgacccgcgcgcagatccacatgggcgagcccgaaggcgaaccgttgctcgacgcggtcgatttggtggccggatacattcccggcgtgaacatcctgaacggcgcatccctgaccctgcatgaaggcgagatcgtcggcatcatcggcccgaacggcgcaggcaaatccaccctgctcaaatcattgttcggcctggtgcacatccactccggcaagctgctgctgaaaggcgaggacatcaccaacctgcgcgccgacaaactcgtctcccgtggcgtcggcttcgtgccgcagaccgaaaacgtcttccccagcctgaccatcgcggaaaacctgcacatgggcgcgttccaagcaccgaaactgttcaacgaacgcttcgactacgtgtgctccatcttccccaaactcggccagcgcaagaaccagctcgccggccagctttccggcggcgaacgtcagatggtggccatggcccgagccctcatgatgaaaccatccgtcctcctgctcgacgagccctccgcaggcctgtccccaatgctccaggacgagaccttcatccgcgtgcgccaagtcaacaaagccggcgtatccgtggtcatcgtcgaacagaacgcccgccgctgcctgcagatctgcgaccgcggctacgtcctcgaccaaggccgcaacgcctactccggcaagggccgcgacctgatgaacgatccgaaagtcgtctccctctacctgggcaacctggaagaagaggttcaagaggaaggaaggtaggacccaggaaatcgcggaacggagcgtataccgcctttccttgccgctcgacgtacgttcgtacgccttcgggctcggacggcggtctccgcacgcgttccgcgatttccccctatgattcaaaattctcaattccgattaccgctgttgggacactgcccgacagtggcttcggcatgcctgaaaacaagctcaaaaccttgtgtttccaacagttttcgggcttcaccttcggttaacttcacgcatacacattcggtttcctcggcacttatagtgcgattcaagatggtcgagcaacacatctcgataatcgtcaccaagggttcggcaatcagcggagccaagagaggaaacggtgattcaaatgaagaagatcaacatgaagggcatgaggaaactgtccatcacagccaccgccatggtggccgccgcagtcatggcgctcgccggctgcggttcgtccggcacggccgattcggctgcgtccggctcgtccggcagcgcgaaatccgatgcgttcatggcggccggcctgttcccgctgaccggttccatggcgtacctcggccccgccaacatcgccaccatgaagctcgcgcagaaagacatcaacgcggctggcggcgtgctcggcaaagacatcgaaatcacgtccgccgacacgtccgacgcggaccatgccgaccagaacacgtcttccgcgcagtcggtgcttgccaagaacccgtccgtcgtggtcggtccgccgtccagctccgtggtcaagaacacctacaagcaggtcacgtccgccaaagtgccgatgatttcttcgggcgccacgtccacggccttctccggccttagcgactacttcttccgcaccattccgccggacacggtgcagggtgcggtcctgggccagatcatcgcacaggatggcgtgaagaacctcgccatcgcggtcttcaacgacgaatacggcacgtccctgcgtgacgtggtcgtcaaaaccgtcgaagacgcgggcgtgaacgtcgtctacggcgaaaaggacacgttcgatccgaccgaaacgaacttctcatcgatggtcacggccatcaaggccaccaaccccgacgcgacgctcgtcatcgccttcgaccagaccgtgccgctcgtcaaggagctcgccgcccaaggcctcgacacccacaagctgtacatgaccgacggcaacaccgtcgaccattccgccgacttcgacgcgggcctgctcaagggctccaccggcaccattccaggtgcccacccgaccgaggaattccagaagaacgtcaagtccttcaacgccaaggtcaccgatttcacgtacaccgccgaaacgtatgacgcgatcgtgctggccgcgctcgccgcgcagaagggcggcgccacggacggtacgaccgtgcagaagaaccttatggccgtctccggctccaccaagggcaaggaatgcgattcctacaaggcttgcctcgccctgctgaaggacggcaaggagattcagtacaagggccagacctccatcggcgcgttcaacgacgcgcatgatccgagctcggcttccatcggcgtctataagtacgacgccgacaacaagccggtcttcgaccactcccaggaaggttccgtaccgaaggcatgacggtcggttcgtccgtggtgcggactgacgtgatggccggacgtgacggctgacggccaggccacgcaacgcaaggggcggtgcgacgcaagcgagatgatcgcaagtgtcgcaccgccccttttgcgggcggaacgcgtgtggagtacatgcggagcgtgcgtggaagatgcgtggaacgcgtcgtgaaacatacgtcgttcacgggtgaaaaagtggatttttcgggggaattgaagagggggagggcgtctttcgtcaattgatagttcatattgtgcggacgattgcaaagaaacgttacagatgcatgtaaaataacacataatatcgcgatttgtaaggaaacatcccgacgatgcgggggagaggtgttgggcaatggtcggcatgcgtgacgtggcgaaagaggccggggtctcgctgagcacggtttcgctagtggtcaacaagacgggctacgtgtccgacgacatgcgcgcgcgcgtcaaagccgccatgaaagagctcaattacgtgcccaacgagctggcacgcaacctgtacaagaaccgcacgaacctggtcggcgtgatcgtgccgaccatccgccaccccttctttgccacccttaccgcgcatctgcaacgcgagctggccgcgcaaggactgcgcaccatgctgtgctccaccgccgacgcggaaaacggcgaggtcgaatacgtggacatgctgcgccgtcacatgatggacggcatcatcgtctgctcgcacaccacccatccgaacgattactggacgtccatccaccgccccatcgtcgccttcgaccgtgtgctgggcggcggcatcgcgtcgatcggctccgaccatgagcagggcggccggctcatggcgcacatgctggtcaacaccggcgcgcaccacgtggtgatgatcggcggcccgcgcgaccagttcttcgatttggcggcgcgcaatggagacagcccggacgatttcgacctgcacaagacaacgttcccggccgtccgctactaccttacgttggagcaggagctgaaagcggccggcgtgcggtacgagtacgtcgaagccggcaatgtggaggatttccaagggtataagaacgcggtgaatgctgtgctcaacagtatgccggtggacggcgtcgatgccgtggtcagctccgatatcggtgccgcgctttgcgtgcgcgaagcgatgcggaggcatatttcgattccgcgcgacctgcagatcatcgcctacgacggcacgtatctgaccgacctggccggtatgaaaatgaccgcggtggcgcagaatttcgacaaaatcgcgcaggtcgcggtcggcaatatcgttcgtgcgatcgccaaggaaggggatgccaaggcagatacgacaagcgccacgggacgcaagccgtacgagccggacgtgctgattcccgtgacgcgcaaactgggcgataccacgcgctaagcgggccgtatcgcccatcattggacgggccgttttacctgctaagcgggtcgtttcgccttattcgtaatcgccggtcggaccgatcttcaacgcgtcctcgtgcgtgcggcccgaatggatcgcatcgttgatcgcctggatctccgccgcatccacggcaagtgcgcgcccgtcgatcgcgctgatcggaatcgaccatccgccgtgcgtcatgtacaggctgtccgcttcgcgcagctcggcgatcggcagcttcctgtactccgccttcttgccctcttcgagcgcccaggcgaacatttcgcgctgtgatgtgccgttcagaataccgatgcgcgggtcgggcgtgacgaacgtatcgccatagcgtgccacaatcgacgaattcgggcattccatcgtgtagccgtcctccgtgaacagaatcgcgtcgccgacgccacggcgggcgcattcgcggtgcacggcgcagttgaacgcgtagctcagcgtcttcgcgccgttgagcagccacggggcgcgtgcggtgatgtccgacgggtagccgcgcgtcatcgaagccatggtgatcggctccagcgaatgcagcgtgcccttcgcgtcaaggaagatgtagacggtcggcgtgcggtcggccgccttgcccacgccggtgtccggatcgagaccacgggagacgatgatgcgcagcatcggaccgggttccggatcgtcatactggtcgatgaccagctggaccgcgcgggtgagcgcgggaatgttcggctcgggcatgtccaccaggcgggcggaattggcgagacgcttcagatggttctccaacgaaaccgggaaacccttccataccgtggtcgcttcgaaaatgccgtcgccacgcagtgcgcacaaatcgaacgcgttgatgatggggctttccggatcgacgaaacgaaccagatccgcgtcgggcgccacgcctgcgcctccgaatagcgtcttgccgttaccgactgccagaacgatcgaactcatgggaacctctcttccgcgctccgcgtcttttgattgccgctttattgctgttgcgctgttgtgttgcgtcagcgttcgcgtgcgtcttcggcgtccaacctaaccatggtttgtttccacttggcaccgccaatttgcaatgcggaaacatacgcgtcatgaatcgcgcggcttccgtaacgttcggcgaccaaggtgagggaaagcgactctgaacgtccgtttctgcggaatcggatttcggggttcgtcggcagttcgttcggaaaaggccggacggcggccgacgggaaaggtaagcgcaatggtggatgggatgtccgatatgggaacaaccgaacttggcgcggcgagcacgcccgaacaggcgcgcgccgcgttccgtgacggcctggtccgcccgacctgcggcatcgcgcaaggctacgcgcaggcgaatctgatgattctgcccaaggagcaggcattcgattttctgctgttcgcgcagcgcaatcccaaaccctgcccgctgctggaagtgatggagccgggcgtcaccgcacccgtcaccgcgccgggcgccgacatccgtaccgacgtgccgttgtaccgcgtgtggaagcgtggcgaactggtagccgaagtgcccgatattcgcgagtattggcgatccgatttggtcacgtttgtgattggctgcagtttcacattcgagtttccgctgatggaggcgggcgtgccggtgcggcacatcacggcaggccgcaacgtgccgatgtacgacacgtcgatcgagtgccgttcggccggcgcgttccattcgacgatggtcgtgtcgatgcgtggcattccgtctacgcaggtggccgacgcatgccggatttccggctattacccgtccgtgcacggtgcccccgtatgtgtgggcgagccgtccgcgatcggcgtcgacgacatcatgcatcccgactatggcgatgcccccgtgttggagccgggcgatgtgccggtgttctgggcgtgcggcgtgaccccgcaggccgcggtgatggcgtccaaaccggaattcgcgatcacgcacgcgccggggcacatgttcatcaccagcaaacgcgatttggaatacatggtgtgagggggagtgcgatgagtgctgtcgtggccggctctgttaccggaatcgatatgaacagcgatatgggcgaaagcttcggtcgttggacgctcggcgacgacgaggcgctgctcgacgtggtttccagcgcgaacgtggcgtgcggcttccatgcgggcgacccgtccgtcatgctgagaacgttgtcatacgcggcgtcgcggggggtaatggtcggggcgcatgtggcgtaccgcgacctggccggattcgggcgccgctatgtggacgagtcccccgacgagctcaaggcggacgtgatgtaccagatcgccgcgttggaaggcatggcgcggtcggtcggcgcgcaggtgcggtacgtgaaacctcatggcgcgctgtacaaccgaatcgtccgcgacgaatcgcaggccgccgccgtggtcgaggctatccgcagcgtggacgcatcgctggcgatactgacgcagccgggcgccgtggtcggccgcctggccgcgcaggccgggcttcgtgtgttccacgaggcgttcgccgaccgcgcgtacaacgtggacggcacgctggtgtcgcgccgtttgccggatgcagtgatcgccgatccggccgaagtggcggcgcgcgtgctgcgcatggtgtgcgagcatgaggtggtggcaatcgacggcaccgtggtgccgctcaacgccgattccgtctgtgtgcatggcgattcgccctcggctgtggcgatggcgcgtgccgtccgcgcccgcttggagtcggaaggcgttgcgatacgcgcgttcgcaggcgacgcagccgcatcggccgcgcgggattaaggcggtggcgacatgcgattcctgacctgtggcgcggacggcatactcgtggagctcgccgatttggacgagaccctgcgggtgttcgccgcgttgcagagcgccgtgaaacatgccgtggaacaaactgcggaatcgcccgagcgggccgcacagccgagcacgacctccgttttcgccggcgtgaaacaactcattcccgctgcgcgcaccgtctacgtcgccttcgatccgctgctttcgtcgcgtgtcgaactgaccgccgcgattcgcgcgctgaacgttgccgccgacatggaacggcattcccgaatcgttgaaattccggtgatttacgatggcgaggatatggcggacgtagccgacctgctgggcatctccgttgacgaggttgtgcgccggcattgcgataccgcctggtccgtggcgttcgtcggcttcgcgcccggtttcgcatacctgaccggcggcgacccgatattcgatgtgccacgccgcaaagtgccacggctgagcgtgcccgcgggcgcggtggggcttgccggcacgttttccggcgtgtatccgcgcgtcagctcgggcggctggcagttgctgggccacacggaaacgccgatgtgggacgagcgggccgacccgcccgcgctgttgcagcccggcgacaccgtgcgttttacgcccgtgcgtgacgccgtttccggcggttcggcttctgtttctgcctctgtgtccgattccgttcaagtttcgcaggcgccagattccatgtccgtctcggcctcgactccggctctcgaagtcctccgttcgggcctgctcaccaccttccaagatgatggccgtgtcgccgcgaacatgggcgtgaccggttccggcgccgccgatcgcacgtcttcccacttggccaacgcactggtcggcaaccccgctaatacccccgtgttggaaatcaccggtggtggcgtgcgcatgcgtgccatcggcagtgtggtcgtggcggtgacgggcgcttcggcggatgtgacgattaccggaagccggcaatcgcaagatagtcaaggcggctcaaacggcacgttcaccccaaattcccccggtggatgcagtggccggaccgtcttgaacgcatcgaacgatgccgccgaccgcaccacagtcgccatgcaacaaccggttctgctgcgtgacggggacgtgctgtcaatcgccccgccgaccagcggcctgcgcgattatgtggccgtacgcggcggtttcggcgtcgcgacaaccctcggttcggctgcaacggacacgatgagcggcatcggcccgcgcccgatcgcagccaaacagcggctcgccatacgtaccgcgtccacggcgtgcgatgccggcgtcggcctgccgcagccatggccgaccgacctgccgaaacccggcagacctacggatttatacgtgcgattggggccgcgcgacgactggttcaccgcagccggcctgtccgcattcctgacgcaaacgtggacagtgaccgcgcagtcgaaccgtgttggcctgcgactttcgggagcggcacccgtggaacgcaccgacacgcgcgaactggccagcgaggccacgccatccggcgcaatcgaagtgccgaccagcggacaaccggtcatttttctgcgcgaccagcctgtaaccggcggatatccggtaatcgccgtgcttgaaccggaatcgttggacgtggccgggcagttgccactaggcgcatgcgtccgcttccacgtcgtttccgcccatgccacgtctactccgcaacctgcgtaccccaccaaggaggttcgataatgccatccgcatcgactgcaccatccgcaacggcgctcccatccccgtcgccatcattgtcgtcgccatcgcccgcaaccccgaaactacggcgcatcctcatcgccaaccgtggcgaaatcgccatgcgcgtcatccacgcctgccatgacaccggccgcatcgccatcgccgcctatgccgaccccgacgcggacgcgctgttcgtgcacgccgccgacgaggcctacgcactgggcggatccgacgcgcaaagcacgtatctcaacatcgcggccatcgtggaaaccgcgcacaaggcgcatgtcgacgccgtccaccccgggtacggtttccttgccgaaaacgcggaattcgcgcaggcggtcatcgacgccggcatgacgtggatcggtccgcagcccgccaccatccgcgcgctcggctcgaaagtcgaagcgcgccgcatcgcggccgaagtcggcgcgcccatggcccccggcaccacggaaccggtgcacgaccccgccgaagtcatcacgttcgccaaggaacacggcctgccactggccatcaaagccgtctacgggggtggcggtcgaggtctgaaagtggtgcaccggctggaagacgtgcgcgaggcgttcgtatcctccacgcacgaggccgagctggcgttcggcaacggcgactgcttcatcgaacgattcctcgcccgcccgcgccacgtcgaagtgcagatcctcggcgacggcgcgggcaacgttgtggccgtcggcacgcgcgactgctcgctgcagcgccgcaatcagaaactcatcgaagaggcaccagcgccgttcctaccccctgaaaccacccgggcgctggaagacgcggccgtcgccatctgctcccgtgcgcactacgaaagcgccggaaccgttgagtttctggtcgatccggacggcacgatgtcgttcatggaagtcaacacgcgtattcaggtcgaacaccccgtcacagaagagatgaccggcgtcgatctggtggccgcacagctggcgatcgccgaaggcgcgcatgtcaccgacattcccggcttggaacacggcacccccgttccgcatgggcatgcgatcgagttccgcatcaacgcggaggatccatcccttggtttcgtaccgttccccggcatcgtcgagcggctgaacgtgccgaccggaccgggcatccgcttcgattccggcgttgcgcaaggcggcgcgattctggggcagttcgattcgatgatcgccaaactgatcgtctccgcgccgtcgcgttcggcctgtctgacgcgcgcccgtcacgcattggatgagctggcgattgccggcgtgccaacggtccgcaaattcgaccaggccgtgctcgaacagccagctttcgtggcgacggacggcgatttcggcgtctacacgcgctggatcgaagaggaattcctgccttccgtggacgtgcgcacgctggccgacggcaaaccgggtcgccgggccgcagcgcccgaaccggtggaaagctgggtcgaggtcgatggcaaacgcgtgcgattgggcctgcccgcttcgctcgcctccgtcgccgcgctgggcgcggggctggccggattggctggagccggcgcaacgggggaccctgccctcacgtccgattctggcgaatcggtcatccaagccctgctgaacgcctatcaaaagtccgttccagcaggatcgggcacgcagaccgccgcaaactcggatatcgcaagcacccaagacacccctatcgaatcgaccatcaccggcacggtcgtccgctggctcgccgatgacggcgcgcacgttgaggaaaacgagccgatcgtcgtactcgaggcgatgaagatggaaaccgaaatcaccgcccccgttgccggcatactgcaccgatcggcgcaggtcggcgacaccgcgcaatacggcgaccccctcggcgccatcggttaacgcggcggccggctgacacggctgccggccgtcggatgaaccgcacgccccttacgcgcaacgcatcgcaatcgcaaaaacaaaacccagaccacggaaggaacgcaacatgagcatgctggattggcggtattatccgaaaatcgcgcgtatcgcacgcatggcgggagccgacgtcggacgcggttccgaaacgttgatgacgtattcgcgcggcgatttgttccgagccgcacgccacttgtcgggcagcaaggaaggtcggcccgcccgcgcgctggtggtcaccggcttctacattccgaaggccgcgcaacccgctgcggaaacggacggcccgttgggtgcgctggaagtatgcatggcattgcgtgcgattggcggcgacgcatggctggtcagcgacgaatgctgcgcgccggtgattcgcccgtccgcattgggtttcctgccggacgaccacgtgctgatcgcgccgaatgccaatcccaagggcggttttgacgcctggctcaacggcgtcatcgaccttgccaaaaccgaacatatcgatacgctcgtctacatcgaacgcgtcggcccggcgcgcgacggcagcccgcacaacatgcgcggcatcgacatcaccgaatggaccgcgccgctgagccagctcacgctgctcggcctgcacacgatcggcgtgggcgacggcggcaacgagatcggcatgggccgtgtggaggactacgccatcgaaggggtggtcgaccacggcgagaacatcgcctgcacggtgccgaccgaccagctggtggtggccggcacatcgaattggggcgcgcacgcgcttgtctgtgcgatgcgcgcgttgggcagcaacgccgtcgacccgtatcttgaaccgacgtggcaggagcgcgtgctggacgtgatcgtcgaatacggcggcctcgacggcgtgcatatgacgaacgtggcgaccgtcgacggcctcgaacccgaccgctactttaagcaggtcggccagcttacggactgcgcccgcagctgaagtcctgcgcccgcagctgaagtcctgtgcccaaggctgagggccctgcgctcgcggctgcccccgcatgtccgtcgctttcgaatcgggcgccggagacatgcgccgcgattcggccgaaagccggttcgacacgcccgaacaccggttgcggttttggtgtcgagccccattttgcggtaatatcgaaccggttcgacacaaccgtgggaatggccgtaaggactcccgcaaagaatctcgcaacgactttttggaaccgaaggaggctccatgaaaaacaaggtgcagctcatcacttacgccgaccgccttggcgacggcaccatcaagtcgatgaccgacattctgcgcacccgcttcgacggcgtgtacgacggcgttcacatcctgccgttcttcaccccgttcgacggcgccgacgcaggcttcgacccgatcgaccacaccaaggtcgacgaacgtctcggcagctgggacgacgtcgccgagctttccaagacccacgacatcatggttgacgccatcgtcaaccacatgagctgggaatccaagcagttccaggacgtgctggccaagggcgaggagtccgaatactatccgatgttcctcaccatgagctccgtgttcccgaacggcgccaccgaagaggatctggccggcatctaccgtccgcgtccgggcctgccgttcacccactacaagttcgctggcaagacgcgcttggtctgggtgagcttcaccccgcagcaggtggacatcgacaccgattccgacaagggttgggaatacctcatgtcgattttcgaccagatggccgcctctcacgtcagctacatccgcctcgacgccgtcggctacggcgccaaggaggccggcaccagctgcttcatgaccccgaagaccttcaagctgatctcccgtctgcgtgaggaaggcgtcaagcgcggtctggaaatcctcatcgaagtgcactcctactacaagaagcaggtcgaaatcgcatccaaggtggaccgcgtctacgacttcgccctgcctccgctgctgctgcacgcgctgagcaccggccacgtcgagcccgtcgcccactggaccgacatccgcccgaacaacgccgtcaccgtgctcgacacgcacgacggcatcggcgtgatcgacatcggctccgaccagctcgaccgctcgctcaagggtctcgtgccggatgaggacgtcgacaacctcgtcaacaccatccacgccaacacccacggcgagtcccaggccgccactggcgccgccgcatccaatctcgacctctaccaggtcaacagcacctactattcggcgctcgggtgcaacgaccagcactacatcgccgcccgcgcggtgcagttcttcctgcccggcgtgccgcaggtctactatgtcggcgcgctcgccggcaggaacgacatggagctgctgcgcaagaccaacaacggccgcgacatcaatcgtcactactactccaccgcggaaatcgacgagaatctcaagcgtccggtcgttaaggccctgaacgcgctcgcgaagttccgcaacgagctcgacgcgttcgacggcacgttctcgtacaccaccgatgacgacacgtccatcagcttcacctggcgcggcgaaaccagccaggccacgctgacgttcgagccgaagcgcggtctcggtgtggacaacactacgccggtcgccatgttggaatgggaggattccgcgggagaccaccgttcggacgatctgatcgccaatccgcctgtcgtcgcctgacggaaaatttcttgcgattacgtattttcttgcgattacgtacggccttgcgattgcgttccaccttgcggtcgcgcacccggtccgtcgcacccggtccgtcgggcggacggcagtggccgcacgtgttggtatcgtaagttgcgttgaagaatcgcccgaatgcgctgaagcaatgcgtccgggcgattttcgtatgtgtcgctcgtagcgggcgggcgcatgcgtggagtatcgaagcacatgaaacgcgacaagcagaaaacgcgataagccaagaaaacagcagatatgaccgaagacaatcagaataacgaattcaaaccgcagccgctgcccggccaggtgttcatccgcccgggcatcgacgatcgccccgattatgagaagaccctgactcccgaagcgaaggcggccatgcgccggctgtcggtgcagcagcatccgcgtattccggaagcgtccaacgagcgtccggaaacccaggccgcgcgcatcgcatcggaaggtggagcgcccctaaccgcggccgcgcatcttgacgtggctgtgccgaacctcgaatcgtccttcctcgacctgcgcgacccgatgaccgctccggacggcaccaggccgaccgcaatgcaggccaaccggctcgttgcgggttttgcgcttggctcaatgctgctgtccgctccgatggcggcgttcaacacggtgctcattccgcaaaccgtcagccgtttgtcgggaatcaaccgcgtcacggatttggcgatgctcgtcatcgcaggtgccatcatgacgttcctgctgaacgcatgcatcgccgtcggttccgaccattcctactgccggttcgggcgccgtacgccatggatcgtcagcggcagcgtattggcggctatctgcatggcgattctttccgcatgtgattttctcccgtgggccgtgttcttctggctggccacgcaggccgcgtatgcgatggcggccataccgttcgccgccgcgttcggcgaacgtgtgcctgacaagttccgcgaccgcgccgattcgtggcacggcaaggggctggcgcttggccagctggtcggcgtcgccgtggctgttgcgctgacgccgcatgccggtggcgaaggttgggatggcactacgggtttcgcgatgctggtattcgcgggttggcttgtcgtcgcggccgtcgttacgctgttggtactgccgttcgaaggggccagcagctacctgccgcgtagggatgttgagaaaggcgatttcttctcgcaataccgtccgccgcagaacgcgccgaagttttctgtggcattcgcggcccgcatgttcgccgttgcggccacagccggaatcgccgtatatcagtggtatctggcgccgaatatcgtcggcaataccgatgaggccggtttgttcggcattgccggtgccggatcggtggttgtggtcatggccatctgcacgtttgtcggtgctttgattgcggcgttgctgcttggccgcatcgtcagcctgtttggcgatctgcgtattccggccgtcgcgtccgccgtgttgttcatggtcgctgcgctgctgccgttgctgatggacgacggtttcctggcggttgcgctgtacgccctgcttgccggcttcgcatacgtggtgttcgatggcgccagccaaagcttggatcttgcgatgctgccggatgtgcgttccgtgggccgatcgcttgccgcttatagtctggccaatacgttcggcacgatactgggcgtcgctgcctgcgccgcggtgattgtggcgaccggtgccaccgtgctgatcttcgctgtcgccactgtttcgatgctgttggcgggtctgctgacattgcggttgaaatcgcaacaatgacggcgactatgacagtgctagatcgccaatgattggaaaataaagcgaaacggcgcgtccacatagtgaacctttagtggataggggagatggacgcgcctatgtttacggcttagttcgagcggaaatcccgcccggggaaaagattttgcgaaaggaggttcgccacgatgaacggaatggtcgcacacgtactgctgtccgcacgaattattattccgctttcgttggcggactgattcgagcattgcggcttcaatccctcgccaacgaaggcagggtttgaggcgcgcgtagcacacacgttgatggccctgcatgatgcggggccatttttgttgcagcccacaaggcagacgcagcgaaaaccttttgaagccggccggcatagcgcacaacagaaaacagaaaaactacaaacaacatcgttatcggcggaagttgggaaccggtaacaggacgtacagggagtacatcaatgagtacagtcgaagcggccgctggcaaagcgcaggcgatggtccgcgattcggtcaaaaccgtgatcgcagcatccatggtcggcaccgccatcgagttctacgacttttacgcatacggcaccgccgctgcgaattatttcccgaaggtgttcttcggagacaccaccaatccgaccgtcgcgctgctggccagcctgctgaccttcgccatcgcgttcatcgcccgtccgctgggctcgttggtgttcggccacttcggcgaccgtatgggccgcaagaccacgctggtggtctccctgctcaccatgggcattgccaccttcctgatcggctgcctgccgacctacaaccaatggggtgtcgcggccgtcgccgtgctgtgcctatgtcgcttcgtgcagggcatcggacttggcggcgaatggtccggcgccgcgttggtggccaccgagaacgctccggaagacaagcgcgcgctgtacggctccttcccggagctgggcgccccgatcggcttcttcctgtcgaacggcacctacttcctgctggagaccttcaacgacaatgacgcgatgcttgcctggggctggcgcgtgccgttcctgctgtcctccatcctcgtgatcgtcggcctcgtcgtccgcgtccagatggaggagaccccgatcttccgtatggcccaggagcagaagaaggtcgtcaagtccccgcttaccgaagtgttcaagaagagctggaaggaagtcatccaggccacgttcctggtggccgtcacctacacgctgttctacacgctggcaacctggtccctcgcttggggcaccaagaccgtcgagcagggtggtggcaacctgggcttcagcaaccaggagtatctgctgatgctgatgatcgccgtctgcgtattcgccgcgttcatcgtgatctcctgcgtgaacgccgacaagttcggccgcaagcgcgtgatcatcatctcctcctgctgcctcatcgccttcgccctgctgttcccgttcctgcttgatccggcggtcgtcggtcagcgcaacttcgccaccaacctgctgttcctgtgcatcggcttcgctctgatgggtaccgcgttcggtccgatcggcgccttcctgccggaactgttcgacgcgaacgtgcgttactccggctccggcatcggctacaacctggctgccatcgtcggcgcggccttcgtgccgaccatcgccacttggctgtcccatcattggggcgtgcattccgtgggcctgtacctcggtgtgatggccctgtgctgcctcatcgcggtgttgagctgcaaggaaacgaagaacgtcgacttcaccaagtgacgccgaccggcttgccgggctgcttcgcttggggtggctcggagccttagaaaaaacgtttgacgtgaatatagccactatgtgaacgccaacagacatcataaagaaagcggtactagaacagttccgcaggagaggcggagtggttcctcggacacaatccggggggagcaacatcctaggaatcactcgccgtgataacaaccgaaaaaagaatagaaaatagcgagtttgttcggaaaaaacaagttccgaatcgcaaaaaacaataaaggagcgccaattatggcagcaactatctggtacgaaaaggacgccgatctgtccgtgttcgatggcaagaaggtggccatcctcggttacggttcccagggccacgcccatgcgctgaacctgcgtgattccggtgtcgacgtcgtcgtcggcctgcgtcctacctccaagtccgtggagtatgccaaggagcagggcctcgaggtcaagtccgtcgctgacgccgttgccgaagccgacgtggtgatgatcctgctgcctgaccagtaccaggccgccgtgtacaagaaggacgtcgagccgaacctgaagccgggcgctgctctggccttcgctcacggcttcaacatccactacggctacatcaagccgaccgaggaccatccggtcttcatggtcgccccgaagggcccgggccacatcgtgcgtcgtgagtacgccgctggccgtggcgtcccggtcgtcgtggctgtcgaacaggatccggatggcaagacctggccgctgtgcctggcttacgccaaggctctgggcgcgctgcgtgcaggcgccatcaagaccactttcaccgaggagaccgagaccgatctgttcggcgagcaggacgtcctcatgggtggcatcaaccacctgtgcgatatgggcttcgatgtgctgaccgaggctggctaccagccggagatcgcctacttcgaggtgttccacgagctgaagatgctggtcgacctggccaacgagggtggcctgaacaaggctcgttggtcctgctccgacaccgcccagtacggcgactacacctccacggtcatcaccgaggagaccaagaagcgcatgcagtaccagctcaagcgcatccaggacggctccttcgccaaggagttcatggatgaccaggccgcaggcgctccgaagttcaagaagctgcaggaagagtacagccacccgcacctggagaccgttggcccgaagctgcgcgccatgttctcctggaacaaccaggtggacgccgatgccgatatggccgagtccttcaacggcaagatcgctcgtacccaggttcagtgagattgcttcgctagctgcataagctatttagcgaattagaaagcgtcgcccgcttcatgcggacggcgctttttgcatatcgtcgtgcgtgcgatggttgcgtacgttccggcataacgaaaggccgccacccaacttgggcggcggccttcaatcgcagttaatgcgattaatcgcaatgaatgcgagacgttactcagccacgggcgatcttgccggtgaaagtggccatgtcagcgtcgtcatccttgccgttgttccaagagaacatggcgcgcagcttcgggccaacgctctcgatacgcacgttgccgtattcttcctgcagctgcttgaacttcggagcgccagcgtcctgatcgtcgatgaactccttggcgaaggagccgtcctggatgcggctcagatggtactgcatgcgcttgcggcagtcttcgttgatgacggtgttggtgtagtcgccgtactgggcggtgtcggagcaggaccaacgggccttgttcaggccaccctcgttcatgaggtcgacgagcatcttcagctcgtggcagacctcgaagtaagcgatctccggctggtagccagcgtcagtgaggacctcgaagcccatttcaacgagcttgttcacgccgcccatgagcacgttctgctcgccgaacagatcggtctcggtctcctcggtgaaagtggtcttgatggcgcctgcgcgcagggcgcccagagccttggcgtaagccagggtgatgtcccaagcgtcgccgcgcggatcctgttcgacagccacgacgactgggacgccacggccgttggcgtactcacgacgcacgatgtggcccgggcccttcggggcgaccatgaagaccgggtggtcctcggtcggcttgatgtagccgtagtggatgttgaagccatgagcgaaggcgacggcggcgcccggcttgatgttcggttcgatatcgttggcccagatggtgcgctggtactgatcgggagccagaatcatgatgatgtcggcctcggcggcggcttccggaacggacttgacttccagaccctgctccttggcgtgctcgacagacttggaggtcgggcgcaggccgacgacgacgtcgacgccggaatcgcgcaggttcagcgcatgggcgtggccctgggaaccgtaaccgatgatggcaaccttcttgccttcgaggaccgagagatcaccgtcgttctcataccagatttgtgcagccattgtacttggcactccttttgtgtagtggggtgaacgcttggaaagcgttcgggtttctaccattcgcagatgaaattcgtggtttcgtgcatggattttgtcctgcaaactggggtccatcctaccggagcggccgttttggtacgtatccagtccacaaagtgagccgcgaaatcgtaaaaaattcgtcgcggcgcaatcgtgatacctttcctgcgaaacccctacggaagcgacgtttcgggccgttggaatgttgtttccgttgggaattgcgattaagtccctaccgaagcgacgtttcaatcgctgaaaatgacgtttgtgtgggcaggcatgtgcttatttaggtgacgcttcacgcattttggtaggaaagtggcttaggataggcacataggattgtttgatgaggaagctgaagcaatggtcactgcgacggggattgcgcctggttccgaaatgacggcgcagatggagcaggtggaggagcgtaatgtctcgggcgtgctgcatatcgccgcgattttcgcctcgcacatggtattgcaacgcaacaagcccattgcggtgttcggcgcattggctgccgattgcgccggtatggaggttgtggcggaaatacacgactttgacggctccctgatcgcgcaggaacatgcttattcttcgcagaacgtggtcaacggcttttcgcagtggcgcgtgatgctgcccgcgcaaccggaaggcggtccgtacactcttcgtatcgtcgcgggcaatgatgccatcgaattcgacgacgtgcttatcggcgaagtgtggctcgccggcggccaaagcaatatggaacttgagttgcgtaacagcgagcatgccgacgaagcacttgaggattgcgccgatccgctgctgcgtttctacaatgtgcccaaaaccggtgtaatcaatcgcaatgcggaaaatacgtcgagctggcaggaatcgtcgccggaaaacagtggcgtgatgagcgccgtcgcctactatttcgcacgcaagctgcgctccgaactcgaccccgatctgccggtcggcattgtcgactgctatatcggcggcacgtcgatcagctgctggatgagcgaggacgcactcaattccagcgatgccggccgcgactatctgacgcgctaccagcgtgcgatcgcaggcaagacgcaacagcagttcgagctggaaaccagcgaatggcagtcgcagatggacgcatggaacgcggctgtggaaacggtgcgtcagaccaatccgaacgcaacgagcagtgagttgagcgaacagtgcggcacctgcccgtggccgccgccgctcacccctacatcgcaatggcgtccgtgtggccccttccacgccatgctggaacgtatcatgccctactcgctggctggttttctgtggtatcagggcgaggaagacgagcaatactgcggtttctaccgcgagctgctcggcatgatgatcggcgaatggcgtgcgctgtggagcgaaaatctgccgttcctcatcgtgcagttgccgcaatggatcgacggcaagacggctgcggacggcaacgatccgatgcgctggccggtgctgcgtgaggcgcaatgggacgccgcgcagtccatagacaacgtgtacgccatctgcacgatcgactgcggcgaatacgacaacatccacccgctggacaagcgcacgcccggcgaacgccttgccaattgcgcgctgcggcaaatctacggcatggatcgcgttccggtgcacggcccgacggtgctgggcttccgatgcgacccgaacggccgcgtacgcctgttcttccgctatgcgcacggcctgcatttcgaaggcaccacgcccggcagcggcgacgatgatttcgatggccagctgccgactttggtgcgcgtgccggaacgttccggcttcgaactggccggttccgacggtatgttccacccggcgaccgccgcgattttcgtggattgcgacatcgatgatctcgtcaattccagagtgaacgtggtcgattacaacgccacggaattcggcattccgattaacagccgcagcatcggcacgattacgctggcgactccggatgtgccggagccgatggcgatgcgatacgcctggcgcagctggggtccggctccgctgttcaacgacgatggtctgcccgcgcagccgttccgtctggacctgaccgaccataccgcccccgttgagtccgccgagcccgtcacccccgacgacaccgctgactgaggccgtcggtctggtcgcgccggtctaatcgccccgtctaatcgcaaaaacggcattcccatccggcttttgttaccgtaaccagccgattcgggtaacaaaagccggaagaggaggccgttttgtgtttcttgcgattactcagcggttgcggcagccgcgtcgacaatcaccgccgcgtcctcgccacgctcgctgccggacttgccaagcgcaagctgggcggcagcgaacagcaccgccagccagatgacgccggcgatcacggcgatgcgatagcttgcggagaagcacatgagcaccacaaccagcagcatgaacgcgatcaccacatacggcgtcacattggcgaacggcagcttgaacgcgatcttgtcgagcgcttccttgccctttagccccttaagttcggccgggccatcgccagccgcaaccatgcgacggaacttaatctccgtaatcataatcatgatccagttgatcgcagccgcgatcgtggcgatcgacatcagataattgaacgcgaattccggccatacgaacacgacgacaacggcaatcgcaataattatcgcggaagtgataacacccccgaccggcacgcctttcttgctgagcttacccaggtaagccggcgcgttgccctgctttgccagcgaatacagcatgcgggagttggcgtacaggccggaattgtagacgctcatcacggcggtcaggcacacgaaattgaggatgccggcggccgcgtgcacgccgacggaatcgaagatctgcacgaacgggctggaatcgccgtcgattttgctccacggaatcaccgccatgatcacgccgagcgcgcagatgtagaagacgagaatacgccagatgatgccgttcgtggccttcggaatggtggtgcgcggattctcggtttcgccggcggtgatgccgatgagttcggtgccgccgaagctgaacatcaccacgacgagcgccatcagcaggcccgtccacgtgccgtcggcgttgcgggtcatcaggccgtgcggcaggaatccgccgtccacggtgaaccagttggcgaagctcgcgcgaatgcccgacgcggtcggcacgttggcgatcacgacatacaggccgccgagaatcatggccagcacggccacgatcttgatgatggcgaaccagaattcgaattcgccgaacttgttcacgcccatgagattcagcgccgcgatggccacgaggaacaccgccgccgacacccacttcggaatgttcgggaaccagtagttcacgaacgagccgaccacggcaagctccaccatggccaccagcacgtagttgaaccagtagttccagccggaaatgaagcccgctcgccgtgaccagtagcgcgtcgcgtagtagctgaacgcgccagccttcggatcctcgaccgccatctcgctcagagcgcgcacgatcatgaagatcgcgagaccgccgacgaggtaggcgagcagaatggacgggccggccagctggatggattcgctggagccgtagaacaggccggtgccgatggcgccacccagcgcgatgagctggatatggcggtttttcaacgatttacggagcgtcggcggaaccggtacatcgtcggttccgcgcggcttctttgcggcggtgacgtcgctcatggagatttcctcttctctgtttccttgcgattgcgcgttgtgcgttgcgctcgctgcttgcgttgcgtgctgttgcacgcttgcatgtgcttgttttgcttgcttttttgcgattcgccctttgtgagggaacgtttccgattgtagcgggaagcggcgggcaaagtgttggtttgttcgttccggaatgtctggtttgcttaacgggttgtttggtttagaagttcgattcgcgcgattgctgtgcgattcgaacgcgcgatttggacacgtgttgcggatgtgcggtttggcgcgtctttccaagcttcatggtgttcaatggaatgaggggctacgaacggaggtcgacatggcattcgtcaaggacatgctgcgaatgtgggcgcattcgtggaaaagattcatttccatcgccatgatcacgttgctcggtgtggctgtgctcaccggcatttacgcgggctgccgtgacgcgttccgcagcaccgatcgctttttcgacgcgcagggcctgcacgacgtccaggtgctgtccactgcgggcctgtcgaacggcgatatcgccgcgttgcgcaaggtgaacggtgttgcgaaagtgcaggcggaacggtcgcaggaagtgacgttcgatttggacggccgcaagtcggcgaccatgcaggaaatcggcacggacggcattgaccagccatacttgcaggaagggcgcatgccgaagaaagccggcgaaatcgcggtaaccaggaaatttattcgcgattcgggcaagcgtatcggcagccgcctcaccgtaacccccgaatcggcttcctccgatacttccgatacgaacgatacgaacggtgcggacggcacgaatgaaacgaacggcacggacgaggcgccgagcttcccgaccaagctcaccatcgtgggcgtggtgctcgatccgcagaacctgagcaatccggacggctactccgccatgacctcgttccgttccaccgccaccaccgactacacgttcttcgcgccgtccgatggcgtgaccggcaccctctacacgtccgccacgctgctcgtcaagggcgcggccgccgaaagcacgttcgacgaatcgtacgaaaacaccgtcaagcaggtgaccgaccgcatcgacggcaccgtgaaaaccgaccgccagaatgcccgtcggcaggaactgctcgacgcgggcaacaagaagatcgtcgacgcgcgtgcggaagccgacaagaagttcgcggacgcgcagtcgcaaatcgacgcgaatcggcagcaattcaaccagcaggtcgaccagattgtcagcatgcaggcgggcgcggcagctgcgggagctgcggcaaacggcgcgaacgcaggtgcggcggcggccgcaggtgcaactaccccccaacttgacgaaaccacgcgtgaaacaatgcgtgaaaccatcatcgccgctagtcccgaactgacgcaagccaagcagcagctcgaccaggcgcaatcgcaattgaacgagcagaaggcaagtaccgaacaaacgctgaaaaccaaggaaaacgagctgaaaaccagcattccgcaagtgcgctggtatgtgcaggaccggcagtcgctcggcgggttcagcgcgctcaaatccgacctcgactccatccaatcgcttggcaacgcgttcccgattgtgttcctgctggtggccgtgatgatgagcctgaccgccatggcgcgcatggtcgaagaggaccgctcgctcatcggcacgtacgtggggctcggctacgggcggctggcggtcgcgtcgcgctacctgctgttcgcgttgctcgcctgcctcatcggcggcggcctcggcctgatcgccggcttccttggcattcctgcgttcctgctggtcgtattgcaaggcatgtatgtgatgcccggcctgcggctggaatacgactggctgtacggctcgctcggcatcgcgctgttcgtggtcggcgtgctcgccgccaccatctacgcgtgcgtgcaggaaatgaggcagacgcccgcctcgctgctgcgtccgaaagcgccgcgcgccggctcgcgcattctgctggaacggcttcggccggtctggaatcgcatcggcttcctcagcaaagtgaccgcgcgcaacattttccgcttcaagtcgcgcctcatcatgacggtcggcggcgtcgccggctgcaccgcgctgatcgtctgcggcctggccatcaacgacaccgtcgccgacctcggcatcaagcaataccgcgacatctaccagtacgacctgatggtggtttccgacgattcggacgcgtcggcgatgcgcacgaaagtcgcgtcagacgggcgcgtcacgtcatcgcttgacgtgcgcatagagtcgggcgatttgacggttgcgggcagtggcgacggtgacagcggcaaggccggcagcagcggcagcgaaagcatccagctggtcgcggtgccggaaaagcatctgtccgatttgggcgaaatggtcacgttgcagccggtctcgtccggcatactgggcacgtccggcgtcggcaaaaccggttcgctgaaactcgatgacgatggcgtgatcgtcgcgcagtcggcggcaagcgcgctgggcgtcaaggccggttccaaggtgcgactgaccaacggcgacggcgtgcaggccacggcgaaggtgagcgcggtgaatcgcaacctcatcggctcggatgtgtatgtaagcgaaacctactacgccaagcttttcgactcgaaagacgcgaagaacaccaagaattccaagagttccgaggattccgaggctctgacgtggaacgccatgctcgccaagctttccggctccgacacttcgcaaaccgactatgcggaatcgctcgaagaggacagttcggtgatgaaggccgtaagctgcgcgcatatggccgacagcttcaaattcgacctcatgggcgcggtggtggcgctgatcgtggcgctcgccggcggtctggcgctggtggtgctgttcacgctcgccaatacgaacgtgtcggaacgcgtgcgcgagatggccacgctcaaggtgcttggcttcttcgaccgcgaagtgcaccattacgtgaaccgcgagatgatgatcctcaccgtcatgggtgtgatactgggtctgccgctcggccggctcgtcggcggcatgctgacgatggcgctcaacatgccatcgttgtatttcgaggtggaggtcaagccgctgagctacgtgatcgcggccgtggcgaccatggccttcgcgctgctcgtgcagctgttcgtcaaccccgtcctcgaccgcatcgaccccatcagctccctcaagtccgtggagtagcgcccctccgaagccctctcagttcttcgggtagcggtagttgtgggggagttgggtggtgagctgcgggtcgaggccgagttccttgagctggcggtcgatttcgaggcgcgcacgttccacaagttcggcgcgacggctgtccaaaccgttcagcccctcctgcttttccagcgattccaacgtctccgccatacgcttgagccggtcctgatggtgcagcagcgcgcgtacctgcgcatgttcgcgcacaatcgcacgccattcggacggcgtatgcacgatctcccgcaccgcggtgacggggtggatgtcggccacctgatacgtgatcgagccgagcagcggcatcaggaacaccgtaatcgcgccggctgcgaccagtgtcgacgcggtgtcgctttgcatggtgccgaccttcaccgccagcgatgtgacggcgacgatgatcggcagcgcggtcgtgcaatacagggctacggtgacgcgatgatgcgatgacagcggattcttgcgtttgtcgagcgatagcgcaacatatacgggcaccgcgcgaatcagcatgagcatgacgatgaatgcgacgagcagtgcgggccggcctgccacggcgcgcacgttgatcgcggcgcctgacaccacaaaaaatacaggaatgaggaagccgtagccgacaccctccaacttcatttccagcgacttgctgccgtcggggatgatgtaacgcaggatgaagcccgcggcgaacgcgccgagcaccgcgtcaagttcgaacagcgcggaaatggtgacaaggaagatgagcaggaatgtggtcagtcgcatgagcgtttgcgatgacgtgttcgcattttccgtaaggaaacggtacaggcgatggccggttctcagtgctttcgtaggtagcatcgcgcacagtaggcagatggcaaggaacgcgccgagcacgagcatggtttgccagccggttcgggtggatagcaggatggccatggcaaggattgggccgagttcgccccacgttccgtacgagatgatggcgtcgccgatgggggtgccttcgaggttgcgttccttgagaatcggcatgagcgtgccgagcgcggtggtggtgagtgcgattaccgtggccacgccgttgatgccttgcttggtgaagaacggaaggaatgtcacaaccagccaggcgaggcctagcgtgattccccatgtaagcagtccgactttgccttgatgtccggcgagtcgtttggggtcgatttcgtagccggcgagcaggaacaggaacgccatgccgagctcgttcaagagtttcacggcgtcgtttacttcgatcacgcctagtccgtacgggccgagcgcggttccggcggcgagcagcagcacggtttgcggaatgaacttgcctgggatcagctgcgccacgattgggctgacggccgccaccgccatgatgatggttagggaaacaagctcttgcgtcatgtttccagcctagtgagtctgcgtgacggtgctcggatacgcggtgacccccatgacgcgctgggggtgaggttaagtttttgttaattttatgggggggggggtctatgagcttttattatccgtggaaaatggcgggactgttttgtttgaaggttggccccctcttttcgttgaaggggatgggtttttcgttcgagggttttaacgagggtgttaatggaaagagcccgatatgatgctgaatcgagctgtttaggcgatctagggggtgtaaaaaaatgattgatggcaaattcacagcaaaggagcgtgcgtatctggccagcctgccagcggtcaaaagcgtgagcccatcccatatccggtataccgatcgctttaaggtcgaggtcatgtgccggtacaacgcgggcgaatcgccgtcggccatctttcgggaggcgggtctcgaccccaagctgatcggctacaagcgcgtggaacggtgcatcgcgcgctggaagcagcaggaggagcggaacaagcgcaggaacgaacatacgaaccattacatgcaggattgtgatgacgagctggaagccatcgaactgcgcggagacgatgtggattagtccgtggtggatctttatggcgctggcgcggcagggacgtcgggaagcgacgtcgcgacgagaaacgttggcgcgtcgggaagcaacggcgtgcaatcgcaaggctcggacaagttgcaggaatcgcgcgcatcgcaggatatgctgtcgaaacttgcacaggcacagctgaccatcaacaaatgcgacatgctgatagccaagcaggcgttgcgtatcgacgagctggaacgcgtgctgcggaagttcatccagtgatgcgtgcgaaacgtatgaaaaacatggaacgtacggaaggcgcagaaccgtctttcaacgagataatcgacgtttccgacgatatgcgcagacggcgtggccgccgcaggaaaaccgtcgccatgcgtgtctccgctgcgctgttgatcgtcacttccatttgcatcggcggttttccggcgatgctgcaataccggtcggcgcacgaactgtcgaatacgtcggaccggtccgcgcgtgcggttgcgggttggccgtatccgcaagcggacgacgcgatcgccgcggccaaggaatacaacaaacggctcgccgcatcgggccagccgatcctcggcgaggcgaaggatccgttctcccaggcgcagggcagctcgcggtccagcgaatccggttccaacgaatcagacagcgccagcgccaaagatacggaatatcaaagcctgctggattccggcagcggtgtgatgggcactatccgtattccgaaaatctccgtgaaactgccgatttaccatggcacgtcgcagtcggcacttgcgtccggtgcggggcatttgtatggcagtagtctgccggtgggcggcaagaacacgcatgccgtaatcaccgggcatcgcgggcttgtggatgcgatgatgttcacccgattggatgaaatgcgcgtcggcgactacttctacatcgaagtgatgggccgcacgctcggctaccgggtggaccgtatttccgtgatcgagccgaacgatacgtcgaagctgaagatcgttcccagcgaagaccgggtgacgttgatgacgtgcaccccgtacggcgttaatacgcatcgactgttggtttctgcggtgcgctcgccgattcccgacgtggtaccggcggagcatgatgcggcgaaggatgcgcgaacgattgcgaccacggccgcggtggtcacgttgctgctcggtctgctgctggcatggttgcgcgggcgaccgtggcatatccgtaggcatgcggcttggtggccgaagcgtggctaacgaccgctgtttgccgatgccccctgccggcttttttattcgggtatcacccatattgtgaaacgttgcgattgcaacggttgacgatggtataatacctcgactttcccgcacttagggtgtgcatctcccgacgtcttttctcctacattcaagattggagcgccggaagtgtatccgtactggacatagcatgtgccggtgcgtgatgcgcggacggtgttagagacggaaaccgcgttgaagcgcggtattaaggggacaatgcacatgaggcatgtacatgaatctgaggcaaagccaaaagggaactttgccaagcgaatcgtagccgcggtagccgcggtcgccatgcttggtggcatgggctacgccaccacttctactgcactagccaatgacgtcaatgccactgttgagcagcagaatggtatcagcattggtctgcatgattacgatcgcaactccatcaacaataatcatgcgttgcattttatgagcggaggaaacgaagccggctataaccgctatgttcaagatggcagaggtgcgtacgcgggcattgtgaagcctctgctgactaacgattatccgaccatggcggatggcaacgaatcgctggattatctcttcggcggtgcgtctgataatgctgtgactaattacacgccggacggtggtttgctgactccggatggtcaagggaattacagtttcgatgcggcgtcgaaatatgcgaaatatgaccacaatagcaatcgattcgaattgaccaatcagacccagagcgggaatcgtgacccgctgttcacgccgtttggcaatgacagcgacgacaataggtattcgttcggcatgaaccttggggccgatttctatatgcctaaagatggcaaagtcaacaatcagaacatggtgtttgatttcaccggtgacgacgatgtgtgggtgttcatcgatgatgtgctggtgcttgatttgggtggtatccatcaggcgttgggtggcagcatcgatttcgccgccgacaagatcaagtacgacaaggttcagagtcatggagacactcctgccgcaacaatcaccgaggcatttagaaaagcgggaaagaagtgggattccaaggcgtatacgacacatcatctgagcttcttctatctggaacgcggcgacggcggatccaactgcaagatcagtttcaatctgccggtgaagccgtccaaggccattgacattgaaaagcagacattgggcactattccagccggtcaacagttccaattccagctgttcgccaatggctcgcaaacgccatatgaaggcaaatacagcgtttacaatgcgtccaccaatcaggttgtcagctctggtttgaacaccggttcgaacggtgtgatcactttggccaaaggccaatttgctcgtgtgcaatccaatgatttctctgatgacacaacctattcggtgcgtgagctgaattccggcaaatacactgtttccgcgaatggtgaggcgttgtcgcagcacaacgatggaaatggtggttcctatgcggaaacccattctttcaaggtgagcgataccagccatgtgactgttatcaattccaatgtgaagccacaaaacaataagaccatcgaaaaggtcgatggtgatggcgaccagtacgagttgcatttgaatgcttcgggtgatagcgcttcttccgaaaccactaccgtcacgccagccgacattgtgctggttatggataagtccggcagtatgcaggataaaaacgacaatcgtgatactaacgcgaagaacgcggcaaataagcttgctgagaaattactgaccgaggcgaattccaaattatcggaatctcaacaagtcccaatggcggttgtgacattcagcgacaaggcctcgactaagcagagcttcaccacatctgtcagcaagattaaaacagctgtgtccagcaaacctgatggtggaaccaactgggaggctgcgcttaagcaggcgaatgatctgcgaggacgcacgggcgtgaagaagcacatcattttcttgtccgatggcaatccgacgttccgtatatccaattatccgattgggtgcagcaaaaaaaggtgcaatcctgatgatgattggcgtactacacctcagggtgtgcatggtgcaggtaccgagggtagtgataattactacggttacaactatgctgccgctctggccgaggccaacaggcgggagagtaatgtttcgctttatgtggtgaaggcttcgactgacgccaatagaatgtccgatttcgcccgtgaagccaaggcagtgaacggtaaggaattcgatggcacgaatgctgagaatctgacgcaagcattcggccagatctattccagcatcacctcatccgcgaagatcaaggtctcctccatcactgacaccttgtcccagtgggtcgacccggtcgatttcgctggcgtggccgacggtgccgatatcacacagtatgtgacggtgaaaaacggcaataaggcgctgacgggcggatatacggccacgtacggtgtcgatcaatctggcaatcgcacggtgacggtgacgtttaacggcacagacggtatcgttactgagaaagccgacagcatcgacgtatccttcaaggtcaagccaagcgatgccgcctatgccacttatgccggcaaccagcaatacccgaatgtgggagagccgaatactggcaccgcatctgcgggccagccgggattctattccaatgtggacgcgcgattgaactattgcgtgcttaccgaggttaatggaactacgtcatgcgcaccgactgaagtcgagtatccgcatcctgtggtgcaggtgaagctcggcaagatcaagatcgtcaagcaatggtcggatggtgcgagcaagcatgatgacggttccgttacggtgcagttgcagcgtaagaagagcggcgattccaatgctcagctggaggacgtcggtggcgtaatcacgctgaataagggcaatggttggcagacgactgtcgacaacctggttcctggatacacgtattccgtggcggaaatctctggtgatgaccgatatgacgtctcctatacgggaaacaatgtcgacttgaccaagcagatggtgtggtcttccaatgccgatgcgggcacgttgaacgcgaccatcactaacacgttgaagacggttgccctggagaacgcgatttcggtgaagaaggacctggccggacgcgagtggaagacctccgacacgttcgatttcactctggcggcgaagggcaatgcgccgttgccggataagtgcgaagccgatcaaccttgcacggtgaaggtgaactccgattcgggcagccataccgcgtccttcggcaacatcacttacaacgctggcgatgcctcttacacgtattacgtgacggaggtcaagggctctatcgcttcattgcattattcgcaggcgaagtatgaggttgtcgtgactgtcgcgaaggactccaacggagagtggaaggcttccgtgaagtccgtgaccaaggtgctggatgacaacggtgcagcagttcccgaatcgcaaagtgctgctactgaacctgtcaccttcaccaaccgatatgtcgcggtgtcggcgctgccgttgacgggtggtgcgacgggacgccagtggctactggtcggtggcgtgatcggcggactcgcggtgctgcttatcggcgctgccgaaatttggaataacaagaagcgactcgtctgagttgctgtgtgaggccggaatgcctaccaacttgagggcattccggccggcaaatcaaaatttgcggatcgcgagagcaagttgggttcccgcctcccgcgattgcaaaaacaagtaatcaaacaataaggaagagaggattctcatgaagatgaggaaacttttcgccggcatcgccgccgcggcgacgctgctgggtggcatggccctgggcacaaccagcgcacaggccgatgacgctgctggtactccggtaacgggcgtagcaacgttcacgttcaccgctgaaaccgctgaacagctgaccaacgccaacctgaaagcatacaagattggcgattatgttcagtatggttccggcgagaacgttgcttacggtgtggtgacgaattctaacaataagactgccgttgactccgcgttgaaggctgccggtgtagatactacggattctgaggtggaccatctggccgcagccctgaatgccggccaactggatgtttctgatgttcgcccatgggcttctcctacggcaactcgtaagtttgccgatgctttggagagcgaaggccgtttgactagcggaactgatgttacgctgagcaacccggttgctgcacaagacggctcttattccgccaccgtgtctttgcaggcaggtatctatgtgttcattgactctgcggttgctactggttctgtgacccaggcaatcccgatgattgtcgcttccggcacggttgctgataaggtcttgactgatccgattcggggcgccaacaccgtgaacatgaagaacaccaacaaccccgaaaagacaaaggaagtcaataagacttctgctgccatcggtgacactctgacctacacccttaccggcgttgtcgcgaacccggctccgaccgcgttcaagttcaccgatactccgagcaagggtctgaccatcaaggctaacagcttccagttctttacggaggaggctaatgcggagcgccaagctgaacctgcgagcaacttcagtgttaccccgactggtgatttcacgggtaatggtaccgcatctttcgatgtcgaggtggagaatccgtccgcttatgcaggcaagaagattgtggtcacctttgaagcagtgatcaatgacgaagctgacgtcgagaatggtgtcgtcaacaagcttgacaactatggcacctcggttcaggtcccgaccacgtttggcaaattcgaattcaccaaggtggatcctgatggcaaaggcattgagaacgttaccttccaggtaaaggacggtgacaccacgctgtacttcgtgaagcagaaggacggttcctacaagaaggctgcttctgctgccacttcgggcgcaactgctgatgtcaagactggtgctgatggcaagctgtctttcaccggtcttgataagaccaagacctacaccgtcacggaaactaagcgtgccagcgatgcctatctcgacatcatgccgagcttcactgtgtctttcaacgaggagaacggttcagctgttctggctaagaccgccacttccgatccgtggggcctggtcaacaccaccgccaagaccgtgaagaacatcaagtccatcacccagctgccgctcaccggcgctgcgggaaccatgctgttcaccgttgtggctctgctcgtggctggcgctggcgtgaccatcgccatcaagtctcgtcagaacgccgaggcctgatcgcccatctctgacggtgttcgttaagaacaccaattcggagtgatttaaggtcgacccattatgggtcggccttttgtattgctctgtatttcatatgggattgcttggattgcgccatattaccgttgctttggacgtgccacccgatgtgggtggacattgcgtttttcgagggtataaggcgtttcagtgggatgtgttgcaacaaacggaatctggaaacgtgaaccgttatgggggctgttagtcaggggagtgaagtgggggtattgcacggaaggagggccatagaatcgcaggcacatccgcaaaagaaagcaacgaagcatcaatgggaggtattgcgatgcgcagtgggggagcattcagtgatgaggagattcagctgttgcgtggattgccggttgtttccaatgtgactcgtgatcgtatcacctattccgacacattcagacaggtgtgcactatccgatatcttgcgggggagtcgcccaccaagatcttccgcgaagcgggtctgccgccggaattggttggttacaagcgtatcgagcgcagtgtggcgcggtggaaggatgcggccatcaagtcggtgagcggcagcgacaccatgaccgatggtgagatcatagcgcagcttgcggcgcggtataagcgtgcgttggcgacgaggcggagtcttgaagacatcgccaatacggccactgagccgaagcctgccgcaacggctgcgtcgaatgacgttcatccgttgtctctcggactgttcgacggtgatacggccggcattattatcaggcagcaggctcgtcgtatcgacgagctcgagcgcgatgtggtgaggttgcgcaacaagctggacaaggaagtcgggcccaatcctgcctccgctgaggcctgacttatgctatctagcttatagatggcgggtggttcgccccatttgccagttcgggggtataaatcatacccccgaaccgcctattctcgtctagcacccgccatctataagcgaaatacctttccgcaaagccccaaatccgccatctataagccagatagacccatcagtttgaccatggatagactcggttagagatgctcttggcaaaaatgccaatttcggcctcctgcaaagggttttgatgggtctaacccatgatttacataaaacctaacccacgatttgcgtaagtcctaacccatgatttgcgtaaaacgtggttcgctcagagctgtggccggagaccgtccaagttcgaccgacattatcggaatcgtcagggaagaaggcacgcgggcggagtgcaatataatgttccctatggctggcagttcaagggggcaagactgatggcagtttttccgcatgggagcgcgcgcggcgggtcgagaagcgacggtccgcagcaaattaaggacttacgcgccgacgatttttatggcgattcgcacgatggcaacgacggctcgcgcggttcgcacgacaccacgcgcaacacccgcacctacaccctcccgactttcgcggaggcgaccgatgtgtccgaagagattcgcgagcgtcgcgcggatcgcaacaagtccattgccctgcgtgtgcttgcggcggtgctgattttctccgcaatcggcattggtcttttcccgaaagtgctgcaataccagtccgcgcaaaagctggcgagcacgtccgcccgttccgagcagagcgtcgcgggctggccgtatccgcaggccgacgaggcattcgccgcagctggggcgtacaacaagcgtctcgccgaatcggggcagccggtgattggcgaggctgaggatccgctcgccgagttgtacaacaacaatcagtccgactccagcgacggttccggttccagctcgacgggcgcaggcgccactggcgatggtaacaaggattccgctagctccaaagacgcggaataccagcgtttgctggatactggcgatggcgtgatgggttccatccgcattccaaagatttctgtggatttgccgatctaccatggcacgtcggagcagacgcttgcgtccggtgcggggcatttgtatggcagtagtctgccggtgggtggcaaggatacgcatgcggtgattaccggacatcggggtttggttgaagcctcaatgtttacgcgtttggatgagatgcgggttggcgattacttctatatcgatgtgatgggccatacgcttggctatatggtggatcgtattaccgaaatcgaacctaacgacacatcgcaattgaagattacctctggcgaggatcgggtcacgttgatgacatgcactccgtacggtgtgaatacgcatcgtctgttggtttcggcattacgttccgccattcccgaagagattcccgcggaggatgatgcggcaaaagatgtgcgtgtgattgcgggcgtggtgtcagctgccacgttgctggtcggtttgttgttggtttggctgctccgctgtccgtggtatgtccgtaggcatgccgcttggtggccaaagcgcaactaggggttgatggcgttaatgttgcacttgacagatgcttttttgtcgaggaaaattctgaaagaggcatgacaacgtttgcttatagtttttgcatcgcgatttacgggggtaagaatactctagaatcgcgatgatatgtgcgatttcaaggaaagtatatccccttgattacctcgttgggagggtatgtatccctctgtttttctccttaaggtttaggcaacgaagcgattgtcggacggtatgtgaagcgaagacgcatcaaatataccggtcgaaggaggaaggtatttccccgatcgcttaacggtacaagggggtaggcgtatgagacacgtctttgagcgaaacagggcgaggggcacaggtctgttcacgcgtcgtgtcattgcggccgtcgcgacggtcgcaatgctcgccggcgtggggtgcgtcactgcttcgtcagcggcggcggaagatgccacgggagccttggaacaacaaatcgagcagccggtattgcaagaatctgggcaagaggattcacagccggtggaacaaaatttgatggtgggagaagagcagccgtcagagcaagagcagccgtcagatcaagaggcttaccagcaagtcgaacaagaaacggaacaagaaacgaaagaagagactgagcagtgggttgagcaggaggttgaacaacaatctgaacaacaatctgaacaacctgatgagcagccagttacgttgtccgctcaaccgattgcgcgagcaaatcgggcgcagtcggttgctcagaacgagactggttctcagttgggcgctccggagaagcataagcgcatcaaaaagaacaatgatggcagttacaccgtgaacgtggatgtgaagggcgctgccagcagcaccacggtcaccaccacccagccgatcgacttcacgctggtgttggacgtgtccggttcgatggatggcccgatgggctcaacggataggaccaagcggttggacgcgttgaagaaagctgtggacaacttccttgatggcgcggcgaatgccaataagggtgcgcaatccggttccgaaccggtccgtgtcgggttggtgaagttctctggtaaggaatcaaataacgtcgggaatgacatgtaccggagtggtggataccagtacaactattcccagatcgtaagcaagctgactgcggatatgagtggcctgaaaaccaaggtcaacgagcttaaagctgctggttccacccgggccgacaatggattcaaacgcgcggtcaaggtaatggaaaatgctcggaccgatgcgaagaaggtcgtcattttctttgcggatggtacgccttcgtcggtgtccgatttcgatgcttcggtggcaaacggcgcggtcaccgcagcgaaaactttgaaggatcaaggtgatatggtgtattccatcggcatcttcgccagtgccgacccgtcctcgctctccagcaaagagaatcagttcatgcatgcggtgtccagcaatttcccgaaggcgatagcgtacaacaatcgtggcggcggagataaagacgccgggtattacaaggccgccaagaacgcgtcggaactgaacgccatcttcgacgagattcagaagagcgagaccaccacatccgcatacaccaaggtgaccatggaggacacgctctccggctatgtcgagcttgcggatagcaactacaaggtcgttgccaaggatgcttccggcaaggtggtctccttgactaagaatgtcgattacaccttgacgtatgacgcgagcacgaagaaattcacggtcgcattcctgaagcctctggtcaacaacgtgacatacacgctggaatacaacgtgaaacccacgcagaaagcgtatgacgagtatgccgccaacctgaacgccggtaaggatggatatgacggcgtaaagggtgacgcgaacaccgatctgccgggaaacgccacgtcctcgaaccagccgggtttccatgcgaacgattccgcgtgcctggcgtactcggccgatggcgtggatcatgcatgcggcggcaatccgtatccgcatccggtgatccaggtggtttcctcgacgctgcatatcgaaaagcagtggagtggagacggtgacaagccggaaagcatcacggtggatatcaaacagggcaacgatacctataagacggtcacgctgaagcgtgacgatagcggcaaatggtccaccgacgtgattattccggcaggcgcccaaaagacgtacacggtgacggaagtcgaaccggacagccacttgtggaaggcttcctaccagcacaaggtcggcgatggaaatctcgctgacggcaatgcggtgacggtgccggaatccacggcatcgcaggaagccacggtgatcatcaccaacacgttgaagcagaccatgctgacgcatgcgattggcgtgcagaaggagctggtcggccgcgattggaaggattccgacgagttcactttcaagctgaaggcagacgattccaatccagacgcgccgatgccagcttcctgcaagaaccagtcggcgtgcacggtgacggtgaaacgcgattcgtctgacgatcacgttgcttacttcggcgacatcacgtatgacgcaggtgaagccgagtacacatatcttgtgacggagaacgctggtaatgcttccgcaatgtattactcgcaggcggaataccgggtggtcgtgtccgtgatgaaagacggaacgtccggtgaatggaaggccgttgtcgaatcggtgacccagctgcaaaccgattatggtgccgctggttcgaattgggacaagacccggccaatgctgttcaccaaccaatacatttcggcatcgtcactgccattgacgggccgcatgggtgcggaacgatggtggcagattgcggccggcggagttggcgtgttggcattgctcgccgtcgctgcggccgaccagtggagacgcaagaagcggctcagctgaacaacacaggatttgcggatcgcgggggcatgttgggttcccgcctcccgcgattgcagaacacagtaaccaacaatcaaggaaaaggagattctcatgaagatgaggaagcttttcgcagggctggccgccgcggcaacgttgctgagcggcatggccatcggcgtcgccgccgcacaggctgatgatgctccattgctgcaagttaaccacgcacaggaagaccatacgtacacgccatacaagtttgccacgttcgagaatcctggcgatggctcggtcgaagtgaaaacggttgacgcatggaagggagctgtgaccaccgctgctgacgcggctgatggaagccacaacggcatcccgacagagtacaaggataatccagcagcctatgtggcgacgttcactgcggatcagctccgtgtcttcgccaagaccttggctggaattactccgccggcaggacctgatggtactggcctgaccgtaactacggagcaggcaaatacgagccaggcggtcaatgtgaacggagaaggctggtatctggtgaaggatacgttcaccaaggctggcgaaacgactgtgacgtcgggaactccggctgtggtggccaccaccgtcaatggactgtccaatctgaggattgcggccgatacgacgaccggtcagggcaacatcacgactgaaggccagttcaacgcgaagaacgcgaatccgaccgacgagccgctcaagttcgcccggatgaatgacgtggatgtgaacggtaagagcgtaaaggtgggcgacaccgtggacttcactgtggccgcggacgttcctcatgctgcggctggctgggatgcgtacccctttaccattaccgataccgcgtccaaaggtttgcggattgcggaaacgagtgacttcaaggtccagttcggagatcatactactgtgaatcccgatctgtacacgataacgcaggaaggcaatgctcaatccggcaccaccacgaccatctattttgccgatgccacaacgctggccggtaggacgatcgtcgtgtcgtaccagggcaccgtcaccaaggatgcgttggatggcttgagcggcagtgtggacaacaaggccacaatcaccaccaaggatggtaccagcggtgaaggcaagactgtccttaagacctacggtttccagttcacgaagattggcaaggaagggaatgaggccaagcctctagccggcgccaagttcgttgtcaagaatgcggagggcaagttccttaagcaggctgaggacggtgcgtggtcgtttgtttccgatcagaatgatgccaagacgttcattactgagaatgatggtttggtgaaggtcgcgggtcttgcggcaggaacctacacggttgtggagactcaggctccgaccggctacgcccagaacttcagggtcactttcaatgtgaagatcacagatgaaggtctcgtcactttcgaacaggatgcccttcgtcaggtccaaccggtcgataacaccactgcgaatgccaccgctaccgtgctgaacgtgaagaatgtcactcagctgccgctgactggtgctgcgggaaccgtgctgttcacggtcgtggcgctgctggtgggtggcgctggcgtggctgtggcggtcaagagccgtcgccgcacgtactgagcgcatgcgttcggtgtgagtgagttgtgaattgactcacgcgcaataaaagtcaatgcgggcggttgtggatattccataatcgcccgcattgatgtgtgaccgaccggttgaagtgatatacggtcagcaatatttgaaaagctgcttgtgagaagtcggatatacacttgcttcattacggggtatagcaaagggggtaaaacgatgcgcggtggaggatcattcagcatggaagagctccaaatgttgcgggatctgccggcggtggctaacgtgtcgaaagaccgcatcacgtactccaacgctttcaaacaggtgtgtgtcatacggtatcttgcgggggaatcgccgaccaaaatcttccgcgaggcgggattgccgccggaactgattgggtataaacgtatagaacgaagtgtggcgcgttggaaggctgccgtcctcaaatccgtgagtggtagcagtgacatgagtaacggcgaaatcattacggagctcgtcaacctgtatgttcatgcggtgacgcgcaaggggaaactcgacggcatcgcaggaatcgccaattccgataaggcgaacattggaaatgctccgcatccgctggacagggcgaacgtgtcgggggggggtgtatatccgctgacgtgcccgtcccatccgatgcggctgccatcgccgtgccgcctacacctctcagcgcgagcagcggccttgacagcgagacggcgcttgtcatcatcaaacaacaggctcggcgtatcgacgagctggaacgcgaaaacgaatcgctccgtggcaagctgaaaaccttggcaagctgactccacccgtcgcaaagcgttttttggaaaagatgcgaatctgccacatatagcgcatttcgcggtgcgaacaacggcggagattgtgcggttggcgcggtagggtgtgaacattatgacttttgggaatacgaaaaccggaaaaactggtacaagcacgtccgaagcgacggaaaccgcgcaaatcaaatccgtcgaaagcctcgacaaaggcaacgacatggaacgcggcctgaaaaaccgccacgtccaattcatcgccatcggcggcaccatcggcaccggcctgttcctcggctccggcaagtcgatcgcgctgaccggaccgagcatcatcctcgtgtacatcggcgtgggcctcatcatgttcctgctcatgcgcgccatcggcgaaatgatgtacagcgacccaagccagcacaccttcatcaacttcatcacgcgctatctcggccgcgggtggggcaagttcgccggctggacgtactggatcgtgctcattctgaccggcatgaccgaaatcacagccgtcagcacgtatttcgtcacgttcttcggtacgttcggcatagacctcaacgcgtggaaatggcttatcgaactgtgcttcctcgtggcgctcaccggcatcaatctcattgccgtgaaagtgttcggcgaggcggaattctggttctccatgatcaaaatcacgctgattgtgggtctgattgtcaccgccgtggtgatgctgttcctcggtttcagctacccggccacgcatatcgaaggcgtggacggcacggtctccggtgccactgtgagccttacgaacattaccgacggcttccagcttgcgccgaatggctggatgaacttcttcatgagcttccagatggtgttcttcgcctaccagctcatcgaattcgtgggtgtgaccgtgtccgaaacccagaacccgcgcaaagtgctgccgaaagccgtcaacgagctgatcatgcgcatcctcatcttctacgtgggcgcgctcgtggccatcatggccatcgtgccgtggcgcaacttccatcagaacgcggacggctcgttcggttcgccgttcatcatggtgttcaaatacgctggcctcgactgggctgccgcgctcgtgttcttcgtggtgatcaccgcagccgcgtcggcactcaattcgctgatctactcggcgggccgccacctgtaccagcttgcgcaggactccgaatcgcccgctatgcagcgcttcggtgaggtgtcggatcacaaggtgccggcgaaggcgatcatcgtgtccggctgtatgattctgttctccccgctggttaacgcgattccgggcgtttccggtgcgttcgtgctgttcgcttcggccgccagcgccgtcgtgatcttcatctacgtgctgacgatgcttgcgcaccgccgctaccgtcaaagcgccgacttcctgccggacggcttcgtcatgccggcatggcaggtgtgcgactggattgcgattgcgttctacgtgttcgtgtacgtcacgctgttcctgtccgcagatacgcgcggttccgccatcgccggcctgctgtggctcgtcgtgttcggcggctactgcctgctgcacgagcgattccagaaccgcgacctgaaggcggctctagggaagtagacgtattgcctgtcgctgcggtatgcgtggcatgcgcgtgttgcgctacgtgtcgcgcattcgacgaaagagggccggtggaaaccttgcgaaaatgtgcgtttccaccgaccctcgtcgtgtaatcgcaataaaacagtgcgaaacgttagtgcacgaatcgtacgaaatcggcgcgaatcagccgatgtagtcggcttcgttcgtcgggctggacggcacggcgtgatcttccgtcaccttgcccaggccggacaggtacgcttcacggcccgcctcgatcgcgttcttgaaggcgcgcgccatcagcggaatgttgccggcggaagcgattgccgtgtaagccatcaccgcgtccgcgcccatctccatggcctccgcggcctggctcggacggccgatgcccgcgtcgatgatcaccggaacgttggaattcttgatgatcacctcaatgaaatcgcgtgcgcgcaggcccttgttcgagccgatcatcgcgccgagcggcatcacgcaagccgcgcccgcgtcctcaagacgcttcgccgcgatcgggtccgggaacatgtacggcatgaccacgaaaccttccttcgccagcttttccgtggccttgatggtctcctcgttgtctggcagtagatacttcgcctcgtgctcgatttccaccttcacgaagtccgtctggcacacttcgcgggccagacgtgcgatgcgcaccgcctcctccgcgttgcgcgcgcccgacgtgttcggcagcatggtgatgcccttcggaatgtagtcgagcaggttgttttcggtggtgcggcagcggcgcagcgccatggtgacgatctgcgtgcccgcgttctcgatggtcgccttgatgaggttcaggtcgtaacggccggaaccgaggatgaaacggctcgtgaacttgtgcccgccgaggatcagcgggtcggcgtcgccggtggcgatctcgtcgtacgcatgagcgtccggctccggcaggatcgcggtgttcgtggtggtgccgaccagctcgtcaagcgtggcgttcggtgcggccgcgacgtcggcggctgcggtggtgatggtgttttcggtgctcatcgtcggttcctttcgttggggtgtttggtgttgctgttgttgtgattgctgtgctgctgttgtgttgccgttgcgtcgctgttgtgttgtgtgcaacgtgcgtttgtaatcgcaataaaaatttcgattacggcagtggagtaacgtagcagtgcgtcaggcgtcttcctcgccgaggatcagtcgcgtgatcatgttcgcttcgtggcaggcgaccacgcccacgcgcggcgccatcaggccggcacccggtaccggagccgtctcgccatcgccacagaagtagaagttcttcgaaacgcgacgcgtgctcaccaggttggagctgcggaagccggccatgccggacgcgctgacgagcttcttgcccggcagattctccagcaccgcgttgacgagcatcgtcttgttttccggcacgtcgaacgcctcgcagatgatgtcctcgttttcgaacagcgtcggcacgttctcgtcggtcaccttgacggtgtcgatggtgatgtccgtgaacgggttgatttggcgcagattgctgcgcagcgcctccgtcttgtactggccgaggtccttcaggaaatactgctggcgattcaggttcgtcatatccacgcggtcgaagtcgatcaagtgcaggtggccgacgccgatgcgggtcagcgccaccgcgatggtggagccgaggccgccgcagccgcaaatggccacgtgcgccgcgtcgagcttgtcctgcgtggcggccgtgtgacggtcgagcagggccgcgcggatctcctcgcggctgaccaaagtggccgggtcgggctggttgtcgaaagcgtgctggcgggcgtcgatctgcgcctgcgatgcggatggttcaaaagtcatggttgttctcgtattctcgtttccgttcgtatggtttgtttcgctgctgtgctcagccgccctgcacgaacgtgacgatttccaacgtgtcggtgcccttgagctgcgtctgcgcacgctgggcgcgcggcacgatctcgccgttgagctccacggccacgcggtcggcgcgcagaccgcgctgctccactagttcggccacggtgatcggcgtggcgacgtcctcttccttgccgttgatgatcatttcggttcccttctgtatgtcaggccccacgagtgccgttcccgccgaaacggacgttcagaactgctttgtgggcttccgagcgtctgcttccggtgaatcggacattcacggttggtacgaaaaaagggtcgccgaaggaaccgtaccctatgaggtggtgcgcccctccgtgaccctaatcacgcgatattcggttatcgcgaacggaaatgagatgcgcctcgcggcgcgaacaacccgtctccttacggcggcattacccgcatcaagtcctcggtcgaagctcgtcgagctccctctcagcctttcggctcccgttcggttgtgccctcatcttcccgcacccgcccgacaacccgctccgcgctgttttgtgcaagaatgggtggcggattttgtagcgacggatgtggcgacggaagggagacggttatgacgaccgcacgaaacatgggcgaattggcgggatttgcgattccacggctcggcatgggcacgatggctttggcgattgaggggcgtccggaccgcgatactgcgattcgtacgattcacgccggcttggacgcgggcgtgcgatatctggacaccgcctggtcgtattacctgccaagccaacccggcaccggcaccgccgaagacctgggctacggcgaaaaaatggtgcgcgacgcgctcgccagctgggccggtccgcgcgacgaagtgctgattgcaaccaaaaccggctatcgccgcaccatggaggcgccgaacgttgccgaaaacgagccggaacgccagcatttgcaggctgtgggcagccagtacgggtggatggcggattcgcgtccggaaaccatgattcgtgacgccaaggaatccgcgctgcacttgggcgtcgatacgctcgacctgttgtattcgcacggcccggacccggaagtggcttatgaggatcaggtcggcgcgctcaagcaattgcttgacgaaggcgtgattcggtacgcgggcatctcccgtgttgacaacgcgcagatcgacactgcccgtgagatgcttggcgacaagttggtcgccgtgcagaaccagttctcgccatcgcaccctgatcctgagcatacgatggagcactgcgcggaacttggactcgcgttcgtttgctggagccccctcggcggctttcttgacgcgttcgaccagcgcgcgtacgacccgttccgcacggtcgccggcaaccacggctgctcctaccagcgcgtggtgctcgcctgggaactgagccgctacgagcggttgttcaccatccccagcgcccgcaatccgcaggaaatcaacgattccttcgccgccaccgaactgacgctcacgcaggatgagctggcgatgctgaacgcctccgtcgacgcccgtcgcggctgaattccgcgcaatacgtacgattggccgcgcccgattccgcacaataatcgcgattcgggccgcagcctttttcgtgccttctgtagcttgctcgctgcaaaatcgccttgggaataacttacactgtaaaatgtttacactgtaagatattatgacggcgattgcgacgaaagggggtgccgcgtgggctttgaagaggaactgttccacgaattggcgaccagcacatgggacaaacgctcgcgcatgcagcaggagatggtgaaaggcgtgaagggcgaacccttcgccgtgcaggaactctataggaaaggcccgctgacgccatcgcagctcgcctcttcaatgaaaaccaccaccggacgcgtgtccacactgctgtccgcgttggagaaaaaaggccagatcacacgcgaatccgaccccgacgatcgccgtgtggtgcacgtgaacctcaccgaagccggcagggaacgcgccgaacggcagcgcgaaagcatgcgcgaggcggtctgctggatcttctcgcagatgggggagcgccgcgcgcgcgaattcgttgagctcaccgaggaattcaccacgtacatgtcgctgtgcatgcccggcaaaccgcgccccacggcggacgaggtcaaagccgcgttctcaggaaacgcacaggaagacgcgtagtatcttacgctgtaaataattcacagtgtaagtaatcgcaatccagtaatcgcaaaaaccgcgaaaaatcgcaaaaactaatcgtaagaaaacaagcaaaacacaaaacaagagaaggaaccaagcatgcttcgcatcgtacgatacctctccaaagcggagatcggtcagatgctcgtcgcgctggtcagcatcgtcggtcagatctggcttgacctgaccctgccggattatatggccgacatcacgcagctcgtcgaaacccccggcagcgaaatgcgcgacatctgggtggccggcggcaagatgctgctcgtctcgctcggctcggcggcctgcgccatcgtcaccggcttcatcgccgcgcgcgtgggtgcctcgttcagccagcgcctgcgttcgctcgaattcaacaaggtggaaagcttcggaccggcggaaatgaaccgtttctccaccgcgtcgctcatcacccgctccacgaacgacatcacgcagatccagatgttcatcaccatgggtctgatgatgatcgtcaaggcgccgatcatggccgtgtgggccgtgtgcaagatcgcaggaaagggcttcgattggacgctcgcaaccggcatcgccgtggccatcctgctggtggtcatcgccgtgctcatgcacttcgtcatgccgaagttcaaggccatgcagcgcctgaccgacaacatcaacctggtggcgcgcgagaacctcaccggcctgcgcgtggtgcgcgcgtacaacgccgaggagtaccaggaagccaagttcaccgaggccaacaaggaactcaccgagacccagctgttcaccaaccgcgccatggccatcatgatgccgttgatgaacaccgtcatgaacggtctgatgctcgccgtctactggatcggcgcgtacctcatcgacgctgccgacgccgtcgacaagctcaccaccttctccaacatggtggtgttctccagctactccatccaggtcatcatgagcttcctgctgctgagcatggtgttcgtgctctggccgcgagccgacgtgtccgcgcagcgcgtgctcgaagtcatcgacaccgagccgatggtcaccgacggcacgcaggacgcgggcaagccgggcgaggaaggcgaaattgaattccgcaatgtgagcttcgcctaccccgactcgcgtcacgccatgctcgaaggcgtcaatttcaaggcgaagaagggtcagacggtcgcgttcatcggctcgaccggctccggcaaatcgtccctcatcaacctcgtgccgcgtttctacgacgccacgcaaggcgaggtgctcgtcgacggcgtcaacgtgcgcgactacaagctgaaggcgttgcgcgacaagatcggctacgtgccgcagcaatcgttcctgttcaagggaacgatcgccagcaacgtcgcgtacggagatacggaccgcgacgacgacaccgtgcgccgcgcatgcgacgtcgcgcaggcgacggaattcatcgacaaaaagcagaagaagtacgattccggcatttcgcagggcggttccaacgtttcgggcgggcagaagcagcgtctgtcgatcgcacgcgccgtctaccgtcatccggaaatcctgatcttcgacgattccttctccgcgctcgacttcaaaaccgaccgtgccgtacgtgacgcgctcgaaaaggaagcgaaggattccacgaaactcatcgtcgcgcagcgcatcggcaccatcatgaatgccgaccgcatcatcgtgctcgacgacggcaaagtggtcggccagggcacgcacgaggaactgctcgacacgtgcgaagtgtatcggcagatcgccgaatcgcagttgagcgaagacgaactgaagcgctgaaagggggagacatgccaagaggaatgggacgcggccgtggggccgtggaaaagccgaaggacttcggcggagtgatgaagaagctcgtgaaattctgcagccggtacattccggtgatgattttcgcgctggttctgggcgctgccggcacggtgtgccagatcatcggcccggacaagctcaaggacatgaccaacgagatcacgaagggtctgccggccatggtgcacggcaagcccgtcatgaattcgatcgatatggacgcggtgtcgcgcatcgcatggctgctcgtcgcgctgtacgtcgggtacgcgctgctgagctacctgcaaagctggctgatggccaacgtcacgcaacgcaccgcacagcagctgcgtgaggcgatcagccagaaaatcaatcgcctgccgctgaaatatttcgacaaagtcagctacggcgacgtgctgagccgcatcaccaacgacgtcgacgcgatcggacagacgctcggccagtcggtcggctcgctgatcacatcgatcacgctgttcttcggcgcgctcatcatgatgttctacaacaacgtgaccatgacgctgtgcgccatcggctccgcgctgctcggcctgatcatcatgggcgtgatcatgaaggtgtcgcagaagtacttcacccgccagcaggtggcgctcggcgacgtcaacggccacgtcgaggaaatgtacaccggccacaccgtggtcaaggcatactgcggcgaggaacgctccatcgagcagttcgagaagtacaacaaagacctgtacgtgtccggctggaaaagccagttcctgtccggcctgatgatgccgatcatgaacttcgtcggcaacttcggatacgtggtggtgtgcgtggtcggcgcggcgctcgccatggacggcaagatcgaattcggcgtgatcgtggcgttcatgatgtacatccgcctgttcacgcagccgctgtcccagttcgcgcaggccttccagaacctgcagcgctgcgcagccgcatccgaacgcgtcttcggcttccttgacgaaccggaactggccgacgaaaccggcaagcaggcgctgctgggcgtcggcgcggacggcaagccgcagccggtgcgcggcgacgtggaattcagccacgtgcgcttcggctacgacgcggacaagaccatcatcaacgacttctccgcgtccgtgaaggccggccagaaggtggctatcgtcggcccgaccggcgccggcaagaccaccatggtcaacctgctgatgcgcttctacgagatttccggtggcacgatttcgatcgacggcatcgacaccaagtccgtaccgcgctggaacgtgcacgaccagttctccatggtgctgcaggacacgtgggtgttccgtggaacagtgcgtgaaaacatcgcgtattcgaagcccggcgtcaccgacgagcagattgtggccgcatgcaaggccgtcggcctgcaccactacatcatgtcgttgccgaacggctacgacaccgtgctcgacgacaaggcgtcgctttcccagggccagcgccagctgctgacgatcgcccgcgccatggtggaggacgcgccgatcctgatcctcgacgaggccacctcctcggtcgatacacgcaccgaggagctgatccagaaggccatggacgcgctgaccgtgggccgcacgagcttcgtgatcgcgcaccgcctgtccaccatccgcgacgccgacatgatcctggtgatgaacggcggcgacatcgtggaacgcggcacgcacgaggaactgctcgccaagggcggcttctacgccgacatctacaacagccagttcacgctggccgagtgaggttggtgtgctgactcgctaaaaaatccggagggaccacccctccggatttttgcgttttggcttcggcatttttattgtgttgcgctgacgggacggcggatttaccattgaggtgactgacgtcaatcgattgacgtatttgaaaatcacaaagaaagtgggcagtcatgaaaagcatcgaaatcggcaaatcggcagtggtcgcatcgcaagcggcgttaggcgtgatgcgcatggacgcgctggacgcggacgcggcggcagaagtcgtgcgcacggccgccgagcatggagtcaacttcttcgacacggcggacatctacggattcaacgtcaaccacgaccatgccagctcgcgtgtgctcggccgcgcgtggaaggacgccgggctcaagcgcgaggacatcttcctgcagacgaagttcggcatcaacatcgacttcagcgacccgaacaacatgcacgccacccgctacgacttctccgcgaagcacctcatcacgcgactcgacgaggaactggaagcgctcggcactgactacgtggacttcgcgctcctgcacaggcccgacaccctgatggaggccgaagaaatcgtcgaagcgttcaccaccctgcacaaggcgggcaaagtgcgtcacttcggcgtgagcaacgtgaacccgtggcaggcggaactgctgcaatcctggctcggagacgacccggccatgaggctcgaggcgaaccagctgcagttcggtctgatgcacgcgcagatggtcagcgacgagctgatgaccaattccggcgccgaaggcatggtcgtggccaaccattcggacggactgctgtcctactcgcgactgcgccacatgaccatccaggcgtggagcccgttccagtccggcacggaatacggcccgttcgtaggcaacgagcacttcccggagctgaacaaggcactggacgaaaagggcgccaagtacggtgtgagcgccaacgccatcgccaccgcatgggtgctcaggcatccggcgaagatccagatcgtgctcggctcgatgaaccccacccggctgggcgaaatgctcgacggcgcggacatcgatctcgacaagcaggattggtgggacctgtacgtggccgccggcaacctcattccgtgagttttgcttgcgattggccggtttgcggtctgcgattggcgggccgccaaccggccaacctggcaatcagtgaccggtcggcaatcagaagaaacggccggggaaaccggcgctgatggtggcgtgacggtcggcgtccaacgtggcgcaatcgaaaacaaaaacgctgcgcagttcattcggatccgcaacgaacagcgccgtagccaacccgtccgccaccgcagtcggatagtcgccaaatgacgcggatcgcaccgcaacccaggcggcttccgtttgttgcacgggcaggccgtcgatggcgttgagcaggtggtgaatcgccagatgcgtctgttcgttcaccgccacctcccaatggcgacggctgggcgcgctcgcacagaacgcgccatcgccgatcagtgcgacgccgaccgcgcaggacggatcatccggatcctcaagcgccacacggatcggcttgttcgtgcgcgtcagcagatcgccgcccgcatcaatcacaaattccggggcagcgctttcgcgtttgctgtctgaggtggaagattggcatgtcgggttggtcgtttcggctgacttgacatgcgatgtgcgcgaaagttctgaatcggtgagcaatccgcccagcgaatccaccagataacccttgccgcacgcgccgaaatccacatgaaccggactgcgtgtaaccaatgtcgtgccactcgaacgaaccacatcacgaccccatacggcccgtccgtgcagcgcgcccaggcgctcgccggcgtcggcttcaacggtgaaactcagcgcgggatcgtaaccgagacgaatcaggtcctcgcccacgcacgggtcgatcgcaccgcgcgtggcggcgtgcagcgcgtcgtacaaatcgaatagcgggccagcccaatcgggaaaatcgaaatgcccgccatgctccgcattgccgatgtgcgcaaccagcgaatcagcgcggaatcgcgaaagcgcatgctcgtatccatcgatgaaccgttccatctcgccgcgcaattccgcagtgatcgggtgaggcgtcgaaatcaacaaccccgtgccgagcgccttgggaaacgcggtggtatacggcatgcgctgtgcgagcggtgcaatggagtccataccacgatgctagcgcgtgcccggcttggcgtagttcgtgcttgggcaacctgatatgcgctatatgtggcatgaggcatcgccttattttgatacccccgtagctttgtatggttacgattatgctaatcgtgattatgcaagtcgcgattatacaaactgacgctttggcatggagttcgcttcacgttttcgggcggacgggggtgttgcggaacggcggtgagcgtcacaatgtgagacgacacgcggaaaacgggaaaaataaaaacggcggaattccaacgttttttcatgcgcgatacaacaagaccaattaaaaatcaagactgttattcaaaaaactttcgttctatcttggcttccgatgcgcgcttcgtacgtcgggtacgtcggggaaatcgcgccgaaaagatttgcggaaggaaggttcgacccatgtcatctcgcgtcgcgcagcgccacgcagccggttcctacgattcgtgcgattcgcgcgtctcggcttccggccgtctcatcacgctcgtcgccgcgctgatgatcgcgctcgccacgctgtttgtcggcatcgcgatgccgcggcaggcgtccgccgctgacggcaaccagacgaatttcgattcctggactgccgtcgcgcagaatatcgccaagcagctcgccaccgccgaaaaagactacaatgacggcgattacggccaggccggcaccggcttccagaccgcgcattggatcggctacgacgcatccaacttctcgaaggccgtcaacgacaccatttccgccgacaagcagcaggcgctgctcacacagttcaccgatttggaaggactcgcgtaccagcagggccaggggagcgcgatcgcaaacggaatcaacgcgctgaacgcggaccttgacacggccgcgcagacgcttgacggcaacgcgaacctcgccgaccccaaaacctacgcgaagcagcgcgccgaacagaccgccgcggaacgtaagaagctcgacgcggccaaaaagaattcctccaaaggcaaaggcgaccgcacgtggagcgaagtcgccagcgaaatgaacgtcatcctcgacaaggcatacaaggccgccatctccggcaagggcgcggaaggctccagcctcgtcaacgacgcgtactaccagtactacgaaaagctcggcttcgaaaagaacgtcatgaacgccatctccggcgaccgcgtctcgcaggtggaataccagttcaagatgacccgcaaaaccatgcgcgacggcggttccgacaaggagatcaaaaagcttgtcgacgacctgaaaagctggctcgtcgaagacgcggccaccctcgacggtggcgcggtcggcaacgtcaacgccttcaccaaagccatcaccagctccgccggacaggcgttcctcatcctgatccgcgagggtctcgaagcgctgctggtggtggccgccgtggtggcctacctcgtcaaatccggcaaccagcgtttcaccaagtggatttacctcggcgtgctcgcgggccttgccggctccggtctgatcgccgtgctcttcacgttcctgttcggaggctccggtccggtccaggaaatcagcgaaggcgtgtgcgcgctgatcgccatgctcatgctgctgtggaccagcaactggatgctcaacaaaagttccgtggaagcgtggaaccgttacatccgcaccaaaaccgagtccgccgtggccgacgcgcaaaacaaagtcgccgccggcgaaggcgtgggcctgggtatggtcgtttcgctcgccatgctgagcttcctagccgtgttccgtgaaggcgccgaaaccgtcatcttctacgaatcgatctactcgatgaatcgcgacgcgcaaggcatgtggatcggcggcatcgccgcgggtgtggtgctgctcgtcatcttcctcgtgctacgcttcacctccgtaaagattccgattggcccgttcttcctcgttacgtcgatcctgatggccgtgctggtcgtcatcttcgccggcggtggcatccatgcgctcatcgaaggtgacctgatcgacggccactatctgtccagcgtgcccacaaacgactggatcggcctgtatccgtacgtcgaatgccttgcggcacaagcgatcgcggcgattgccgtactcgcgctgttcgccgtcggcttcgcacgcaaacgcaagttgcgcacgcctgacaatcgcaagtaatacgcaaattttccgagatttaccgatattttttccacatccaacaacaaaggaaagagaaatgaagaacaagaagatcgccgctctgctcggcatcctgctggccggctccatggccttctccctgtccgcatgcggcaattccaacgattccgccgcttcggacaagtccagcgcctccgcgtcggcttcgaaggccgacgactccagcaaggacgattccagcgattccgccggtttcgaagagatccaggtcgatgagaagcactccgaccaggaatgcggcccgctgaccgtcaacgccgtgtacttccagccgatcgacatggaaccgtccggcatgggcctcaaggccgccgatgcgagcttccacctcgaagccgacatccatgccaaccagaagggcaccgaactcggctacggcaagggcgatttcgtgccggacctgaccgtcaactacgacatcatcgacaagacctccaacgcgtccgtcgcctccggaaccttcatgcagatgaacgcctccgacggtccgcactacggcgccaacgtcaagctcgacaaggccggcgcgtacaagctcgtgctgaagatcgaatccccggagaagaaggggtggatgctgcacgtcgatccggagacgggtgtgaagggacgcttctggacggaaccgatcgaggtcaccttcccggactggaactatacgccgcaggagtggtgatctcctagcgtagcccgttcgcggtttcggtatgcattacccgacacacccaaggccgttcggccaagcttacggtcgggcaatgcataccgaaaccgctctctcgcgtttagggggatggattcacctctgcgattgtggagggggtccgggaaatcctcgcattttaggggagggatgagaggggtgggactctttgggatggggcggaatgggaatcgttgggctctttgagttgggtttttggatgaaaggattttgggatgctgctgcagtttgtgacggtgttgcagggggtgttggcgccggcgctgctcgtcatggcgttgagcgtcatgctcaccgtcggtgaggggcgtgacaagcctctgagcgcgtactggcggctggccggtttcgttgttggattcgccggcgcagtcgtattcgccgcgctgcgcgccaccgccgtcatcacgcaacgcacgttcgtcaactatccgaccctgtggtgctgcgtgatcctcgacgtggccgtgttcgtcatagtcctgttcgcccgccgcatcaccgccgactggcacaaccaccgcgcgctgctcgacatcgcgaatctcgttgcggcgcttgcgatcgcggccaccacctttcgtgcgctgcccgacgtgattctgcgactgacgatcttcgtcgagccgggcgatcccatcttcacttccgacatgctgttgcgcgcgctcggcttcgctttgggcgcggccgtcgcaatcatcgccgcgcttatcttccgcacgatgcgttccaccgccgtccgctggtcgttcacgacggcggtgctgctgttggtcgcgctgttgttcgcacagcatttcaccgaccttgcgcagatcctccaatccaaacgcatcgtcagcttcccgaccgccgccttcctcgcgctcgtgtggggcatcaaccatcagcgcagcctgaccatcgcaatggcgctcgtcttcgccattccggcaatcgccagcatcgtcatgggcttcaaagtcaagccgaccggcgccaacgaggcgatcgcacgcacgcatatcgcgttccgccgccgcgcgaaagcggccggcgcgttcagcctggtcgccatgatctgcgtcaccgtggccctgacgtacggcgtcgcgcaaacgcagaaagtcgtcacgctgtcgccgccggaagactactcgctcgccgacggcgtggccaccatcaaattcagccagatttccgacggccacctgcatcgcttcgaataccgcgcgaaggacggcacctccatgcgattcatcatcatcaagaagaacggcggcgcgtacggcgtcggcctcgacgcgtgcgacaactgcggcgacgccggctactacgagaaggacggcaaaatcatctgcaagaagtgcgatgtggccatcaacctcgccaccatcggcttcaaaggcggctgcaacccgataccgttcgactaccaggtcaagccgggcaaaatcgtcatccaaacgtccacgctcgacgcgctgtcgagccatttccagtgagcgccgagaaaggtaagggggtgccatgttcttcctgaaaatgatctctcgctcgttcagccggcagttcaaacgccgtctgctcatcgccgtcaccgtgtgcctgtccgccaccgtcagcgtggccatgctcggcgtggtgttcgacgtgggcgacaagctcaacgcggagctgagcacgtacggttcgaatatcgtcgtgcagccgaagtccgacgctgtggtgagcgatttgtacaataccggcgattctgctggctcggcttcgggtagttcgtccggttcggacgggggttccacttccgacggctcggctgcggcggacagcgccgacccgaccgcgtttctgaaggagtcggacgcgcagaagatcaagaccatcttctgggcgttcaacatcaccaatttcgcgccggaattgaacatccacgcggatgcggggtgtgtcggttcgggggctggttcggctggctctgctggaacggctggtgcgtcaggtgcggctgcttccgcggcgaaatgcaaggcgaccaacgtgccgatcgtgggcacgtggttcgcgaaaaccctgcacatggactccggcgagtccaccgtggccggcatgaacggcatgcgctcatggtggaaaatcaacggaacctggccgaaagacgacagcgagcaggcgatggtcggcagcgcgctcgccgcgaaactgggcgtgaacgtcggtgacagcgtcacgctcgacaagacgatcgccgtcggtgcggacgacaatacgaacggaggtaccgggaaaaccggcaaatcctccaccgaacgcaatcgcgtgaaagtgaaaatcgtcggcatcttcgattcaggcgattccgacaacagcgccatttatatgccgtccatcgccgcgcaaacgcttgcgaatctgccgaattccatcgacaagattgaagtcaaggcgctcaccacgcccgacaacgacctcgcgcgcaaggcatcgaagaatccgaacgcgctcacgcaggacgagtgggagacgtggtattgcaccgcgtatccgtcgtcgatcgcgtaccagatcgaagaggtgctgccgggcgcggtggccaagcaggtgcgccaggtggccgcgctgcagggcgatgtgctgaacaagacgcaggcggtgatggtgctgatgaccgtgctgtcgctggttgccgccgcgatcgccgtggcgaacctgatggccgcgtcgattggcgaacgcggttcggaattggcgctgttgaaggcgatcggcgccacggacggcgcggtttcgcgccttatgctcgccgaaacggcggtgatttcgctggttggtgcgattgccggcgcgctgcttggctcgggcgttgcacagatcgtggggcacgtggtgttcggctcgggcatcaccatgcgtccgatggtgttcgtgttggttttcgtgttgctggcggtcactgtgctcgtggcctcgctttcgtcgattcgggcgattctgggcttgcgtccggcggaggtgctgcatggtaggtgagttgtgcttggctttcgtagggggtgtgcgatgacgaatcgcaagatgttcttcactatgctgtggggcgcggtgttccgccgtcgctcccgtgcgatgatggccgtgatcgcgtcgctcgtcggcgcggccacgctgttctgccttgcatccgtgtgcgtcgcggtgccgcagcagatgaacgaggaaatgcgcgcgtacggcgcgaacctgatcgtcacgcccgcgtccgcaacgggcaaatcgcaaggcatcgatactgcaaccgtacgcaacgtgacggcgctcatcggcgccggacacagcgtgaaatcagccgcataccggtatgagagcgtgcgcatcaattccgcgccgtacaccatcgccggcgtggacgtgaaagccgtccgcgcgctcaatcgccattggaacgtgacgggcgattggcccggctcgggcaacgtgatggtcggccgcgacgtcgccgacgcgctcggcgtgaaggtcggcagccgcgtcaccatcggctaccgcgccgccgacgcgtctgcttcagcgtcttcttccgcgtccgcaaaatccgattcggacgaatcaactgaaacggcagaatcgtccgcgcagggcacgcagagtacacaaactacgcaaggcgaacagaccacgcaagccacggaaaacggccgcgtctcgtccgacatcatggataacaacggcaccgaattccgtatcgctggcatcgtcgacaccggcggcaacgaggattccatcatctacgccactaccgcggacgtgtccaaacttgcgggccacgagcgcggcgccgacgtggtcgaatactcggtgaacgccatgggggatgagctgaacgccatcgtcaacagaatcaacaaaaatacaaacactgccgtccaagcgcagaccgtcaccaaaatcacctcgtccgacacccgcatcatcgccatgctgcagaccctgttctggattgtctcgctcgtcgtgctcgtgctgacgctcgtcggagtgggcaccaccatcagctccatcgtgagccagcgtcgcaacgaaatcggcctgcgcaaagccctcggcgccgactcgcgtgttatcggcgtcgaattctacgtggaatccggcatctacggcttgatcggcggtctgctcggcactgctatcggctatgtgctggcgcgtgtgctgtgcgccaccgtcttcggtcgcgcgatcggcttcgactggctgctcggcgccggatcgctgctgctgagcgtggcgatcgccgtcatcgcctccattccgccggtccgccgcgccacccgtatcgaccccgccatcgttttgagggaggaataatcatggacaacgaacatatgctgctggaactcgaccacatttccaagatttacggcgatctgcacgccgtcgacgacctgagtctgaccgttccgcaagggcaatggctggcgattgtcggctcgtccggttccggcaaaaccacgctgatgaacatgatcggctgcatggatacgccgtcgaagggttccgtcatgctcgaaggccgccggctggaggatctgaacgcccgccagcttgccgatgtgcgcaagaacatgatcggactcgtgttccagaagttttacctcgtgccgcatctgacggcggtggagaacgtgatggtggcgcaatactaccattctgtagtcgatgagaagcaggcgatggaagcgctggaacgagtgggattgaaggagcgtgcgcatcacctgcccggccagctgtccggcggtgagcagcagcgcgtgtgcatcgcccgagcgctcatcaactgcccgaagctgattctcgccgacgagccgaccggcaatctcgatgagaggaatgagaagatcgtgctcgacctgttccgtcagctgcacgagcagggcactacgatcatcgtcgtgacgcacgatgcgctcgtcgcctcctgcgcgcaacgcgaaatcatgctcaaccatggtgtgctcgtcggtgaacagtggaatgacgaggaggcgaaacgtgcgtacgaggcggccggtggcaagcctgcgcacaccggttccgccgaggaaggcgcgcagaacggcggtgtcgcgattttgttcgccgaccctacgaaggccgcaaaaaccggagatacggacgcggacgccgacggcacggaaggggagcgcgcatgagcgccgcacaatcgaacgcaatcaaagtcatcgcactgtccgcggcgagtatcgcgctgttgtcggcatgcggcgaaccgaaggcaacgccgatggacgacgaatacgccggcaattccggtgaaagcgtgcaatcgcaggaagagaagtcgaaaactgacggcaaggcgtccggtgacacggcagacgacggcgacgccaccaaaaaccgtgccgacgcgaattccgcaacatccgacaagcaggacaccggcaactacgcggatggcgactattcgatcaacggccagtacgggccggtcggcgaggataccatcgacgtgcatctgaccgttaaggaccagaacgtgacggccgtggaaatcgttgggcatccgttcacgtccatctccaaaaagcatcagaacgacttcgccaaagccgtgccggacgcggtggtcggcaagccgttgaaggatctcaaagtagacaagctcgccggcgccagctggacctccgaagccttcaacaaggcgttggaagtggcgcgtcaagaagcgtcaatccaatagcccattccttctgaaaccgacacggcatgcctgtcttgcgtcggtgcggacggttttcctgtggttaccgtgcggattcggcgcatacgttcggccagagcaacgtggccatgttctcggcccaggaatcaggcttgcgttccttgccggattgccgttcccctccggcttcctgccccgccaacgctttgcaagccagcatggaacccagcaccgtgctgaacaggaacgtgtagtccaaacggttttgaaacactccgtcggcgatgccacgttccatgaaccccacgaaccgttcttcggccggcgctagaacttgtgaggcaatcgccttcagcgtggcgttgtcggaagacagcaccacgcccacggctttcaatccgagttcgctgtcgaagcagtcctggatgcgttgcagcatggtggccagtccgttccgcgacggcttcaaatcgttgaaattcggtagtccggcaacttccggttggatgcgttgcaataaatcgtcggcgtttcggtagcgtcggtagattgtggtctttgctacccctgaacgtcgtgcgacctcttcgatggtcaccgctccgataccatcggaaatcactatccccaatgtggctttcatgattttgcggtcggtttgctcccgtaatcgctcacgtcggccacgtactgtgccgacgtcttcctgcgtggttttttgcaccgtcttccgcgtgacctcttgcgtggttcctctcatcatgccgcgatcactttcgtgctttccagcttgcttacgtaccaatggttgaacttgaccagtggaatgcgcagtagcaggcctatcagcagcagcggcggaatgaacagcagtagcgcgccaatcgcaaaccagtaatcgttactgtagattccgccgatcgccgcgcgcattgctgtgattgaatgcgtcgcaggcaggaacgggctgatgccgctgatgattttcggcagtacggccagcggatatgcgccgttcgctccggagatctgcatgacgagaaacagcacgccgatggctttgccgacgttgccgaagctggccacgagcgtgtaggtgaagaacgagaacactaggctgctcacccagccggacagcatgaacagcagcggatgcaccgcctggacatggaggaacagcagactgcctcccaaggagaacgtgctctgcaatagtccgatcacgccgaacacaccgtaatgtccgagaaacagctgatgcggtttcgggtcgccgagttccttgcgcaccttacgcgagacggtggtcttgagcgtcactgccatgagcagcgaaccgacccacagtggcaggatcgtgtagaacggtgccatctgcgaaccgaagttcttgactgggaacaccgcgttgcgtttcacttttacaggggctgcaagcgcggcggccaacgagtcggtattatcgctgagcacatctttgacggcgctcatatcgccgctgttcagcgcatcggtcaatgttcctgtgaatgcgcccagttttttgcccgcgccggccagactatcggcggtggaatccaacacgctgctgatggcggtcagattcttatccgcggtcttggtggtgccgttcagattgcccagcgcgcctttcagatcggccgctgtggcattgagcgcggtggtggtgctggtaatggacgtggcgatatcgtcaagttgcggtttcagttggctctcatagtcggttttgatgccactgacggacgttgccgcctgctgcgccagtttcttgatctccgcacgttcggccgtggtatcgcttactttggcgtcgatgttgtcggcgctgccattcagcgccgatgctaggtcgttgagctgtgtgatggtggtgccgacgttggttttgagatggtcgatggcgttcctcaccgcttccggcagcttttcgtttgcgctgagcgcgtcgagcgaatcatagatctgctggtagctttgcgcctgcttgctgatgttcgtggcctggttgcgtaatgcgttggcggtgttgccggcctgcgtgcccgcattgccgaataggctgtccacatctgcttccatggctgtgaagctgttggcggaatcagtcagagccgtgcccagcgcggtggtgccggtcttcaacgcgcccgtcagatcctccacgccgctgccggcttgcttgagtgttgttcctacgcttttcgcattgccgctgacattggcgatcagaccgtcggaggactcaagcagatgccgtgcgctttggggcagcgtgctgaacgtgcggagcgttccggaagcgtcggtgagcgtttccgcgaagtcgctgatattgccgttgaactgcgtgagttgttcctgcgcggctggcttgtcgagttggttggcgagctgcgatgccacactcagcgcggtgctggtcagtgtttcggagaacgtctcgttgacctgcgcgctgaccgtatcggcgccttggcctgtgatcttcggagccaaggcgttcttcttttcattgttgtagtaggcgatttcggcgtggtcgccatcggatgcgaagaacgtcatcatacgggtgctgaagttctttggaatcaccacagctgcgtaatatttgccggatttggtgccgttgatggcttcttttttggtggtgaaggtccagtcgagctgatcgttggaacgcagcgtgttaaccacttggtcgccgatgttgatcttcactggaatgaggtcggaccggtatccgtcgtcctcattggctacggcgaatttcagattgccggtattggcgaacgggtcccagctggcggccacgttgaaccatgtgaagatgccggggatcacaacgagtccgatgacgatgatgatggagacgacgttgctggtgattcgccggatgtcgccgacgaacagtttccagatggttttcatgcgttgctcctttcctcggtgttttcggttgtctcggttgtctcggcggtctcggtagtctcggtggtgtccgtggcggcatcgttcgcggcggcgcttggaccggtcgtctgcattttctgcaccagtatggcgattccgtcatcttcattgtggttgacgcccgtcacgttttccgtcgtttctttgatgacgctggtattgcgattatcggatgtcgtgcgtttgccgctggtgcgtctccgcgttttgcgcagcagtctgttccgccgttcctgttgcgcccgctttttgcgacggatgcgtgccgcttggcgctccaccagcatggattggatcgtttcatcgctcaaatggccgagctccgcttgacggttcagattgtcgcgcatgtattcgatgaccatgaggaagcccatgatgagcagaatccagacgacccacgtggccagtaccaccactttctctccgttggtgaacgagaacaccgccgccagagttaccggaactacgaatccgatcaccagagctccgcgcttgagtttcgggtacagttccgcgaaccgacttgcgcgttcctcgatcacctcgcggtagccgcctttgtcggccagcacctgaatggcttgggacatgttgtatccgcgttccggaagctccacttcctcgccgataatcatgtcgctttccttgatttcgcgggcgaacagtcggttgaggttgaccaacagaggacggaccaccagaccgatgacgaacgccatggcggcaaacagcagcagcgtgccgatcgccttgatccaatggccgtcgtagaagccggcgatggtctcgcggaatgcgtctatcgaatagctgaatggcacgaacggatagaccatgcggaagaacttcggcatcatctcgatcggatacaggccggaagcgcctggaatctgcacgatcaccaacgccacgcacaggcccttgccgatgtgcatgaacgtggtggacagcgcgtacgtgatgctcagatataccagcgatgtgatcatgccggtcagtatgaacagtggcgcgcaagccgtctgcacgccgagtatcagatcgccaacggtgcagatcgcgccttgaatgacgcccatcgtgccgagcaacaggtatcgggccagatacttttcggttgcggtcggatcgagaccctcaagcccctcgtcgtccacctccactttgtagatcaccacaaaggcgaacgcgcccacccacagtgccagattggtcatcagcggagccatgccggagccgtaggagttgacgggatacacgttcttcgtgtcgattacggtcggggactccatgaacgaggcgatcttatccgcgtcaagcgaactgctgccggtcaacgatgcgagcagatccgcagtgcccagcgccttcaggtcggtgctgacggtggtgagcttcgtctccatcttcgccagctgctggtcggtttgctcaaggccgatgcgggtgtctgacgccacttggtcgagttggtcgagcacgatgttggtttgcctgaccacgctgtcctggctggtcacggtgccggcaagtgttccggccgtcccagccagcgagcccagcgcggaattcagtcgcggcagtgcgcctgaattgatggcgttgcgcgccgtgcctgcgcttttgagcgagttctgcgtgcctatgttgaaatcggtggacagtttggatacgctgccggctgtggcctgtgtgttctcgctcagggttttgaggtcggcgagtgttccggctgccgtgttgttggtattctccagtttgctgatgatttgctggtattgcgcgttgtcgctggcggatttgagcttctcgagcagtttcgcattgctgtcggtgatgttttgcatgccggtcaccgcctgctgtgccgatccacttgccgcggatatcgccgacgagatctggttgatgctggctgtggattgcgccgtcgcttgggaaacaagtccggatccggtttccagcgcgctgttggcgttggacgaaagcgtgttgagctgggtttgcgctgtgccgatggcggtggatgcgcctgctagtcctctgcctgcgctcgccgcggccagctgcacgtcgttcagggcattgcgtgctgcttttgtctgctgtggcacattggctaactgggtgtcgagatccgcgattgcggagcggatcgtgcctacgttccgcttggtgttgtcgagttcgccgatggtttcgttggcgatggtgttggtgttgccgctgatggtgccgttggctgagttgacggctttgacgagcacgtcgctgacggtggagacgaaggtgttgttgacggtgcggtcgaccacggtcgcgccttggtcggtgattttcggcgaaatcggactcgccttctcgttcacgtaatattcgagcgtggggcgatgcttgctgttggtgacgacgttggccagatcttcgctgaagtcggaagggatgacgattgcggcgtagcagtcgcccgactccaccgcttccatcgcgttggctttgcccatgaacttccagccgagctggtcgttgctcttcagcgtgccttcgatttgatcgccgagattgactttgccaagcagcgcgttgtctgtgccttcgtccatgttggccacggccactttgatgctgtccgtgttgccatagggattccagaacccgtagatgttgaaccatgcgtatagcgggggaatgagaatcaggccgatcataatcacccacgtggcgggtacggtgaccaatcgtttgaagtcacggcgcaggatctgcagtacgttgtgcattgtctctccggtttggcgaatcaattcccttatatggcgatacgtgttccgtagcgctacgcggttcgtatcgtataccgtgctcttggacaatcgccatcgcgtttcatggatgacggaaatcgggtcgagtactgcggcaaagcctcggcaaaaccatcgccggctgacgtagccccttccgctcacgtccgtgacaaatcgccatttctgtatgtccgtgagcgaaaggtggtaataaatcgctattttccgtccgtatttatacccccattcgctcacgatgcgctatacatcgccatttcttgcggacgtgagcgaaaggtggtgtgcgaatggcgattgcagccagctgacgtccccctcttttgctcgcgtccgccaataatcgcacctgaaccgcttttcttgcggcggatattgcctacgtttggtagcgtgggctgaaggaaggagcggcatatgagcgaaaccgcacaatctgaatcacgatccgaggattccgccgcgggcaagacggatggagaaatcaaggcgattgccgccgaaaccgaaatcgcggctatcgaagaaggcggaaagcagggcactggcgaagtcggcaatcccgctgaccgtcgtctgccgttaatcgttcgcatttacggcatcgtcatgcttattgaaggcgtggtgacgctgccgttcattgtgttggcgtgcctgtactcgattcgcgcggtgttttccggcaaagtggcgttcgatgcgctcagcctcaccgcgattctgtcggtggttcacgcggccgtgctgctggtcgccaccgcgtgtctggcggtgttcggcgtgatgctcattatgaacaagcgtcggcatatcgcgcaatggacgtatctgatgattccgctcacccttgccgaaggcttgctgtcgctggcattgcagggacttggtgtgaatttgatcggcccggctatccagcttgtcgtgctcataaccctgcatgtcactgccgatccgtcgctgcgtgaggagcgtcgtctgcagttcgcgcttcgacgtatggatgcccgtagcgcgtacgaaagtgcggcttcccgaggaatggccggccgtgatttgactggcaggggctatatttcgctggatttcttcaatctgttctggctgttcaccattggttgtgtgttcggtttggtgatcgaaaccatctaccatttcatcctgtttggcgaataccaggaccgtgcgggcttcctatgggggccgttctcgcccatctatggtttcggcgtggtgatcgtcaccgtgttgctcaaccatttgtggcagtcgaattggttgctgattttctgctcaagcgcggtgatcggtggcgcgttcgaatatttcaccagctggttcatgcaggccgcgttcggtattcgcgcatgggattacacggggcaatggctttcgattgacgggcgtacgtccggcaaatacatgttcttctggggtatcctcggcttggtttgggtcaagttgattctgccgcgattattgcgattgattcagcgtattccgtggaagattcgctattcgttgacgctggtctgcttcattttccttttcgtcgacggtgtgatgacgctgatggcccttgacgcttggtattcccgcatggctggggttgcgcagaattcgcccgtttcgcagttcttcgccacgtatttcaatgacgatttcatggcccaccgattccagaccatgaagatcgacccgtccactgccggtcgtatgtaggctggtttttgcgttttgcgggttttgctaagcggctggtcgggcgatgttccggctggccgctttgctttgggtggctgattttgaacgatttcggacgattgcagtggggttttgttgcgggttttgccgcgggggatttgattcttccggattattgccgtttgggattcgtgccttccggctgtctggatgcttgactgctgttgccgcgcctacgccgcgatgctttgcgccagctggcggatgaggtcggggcgatgtccgctccatgaggaattcggtgagatgaccaccggaatctgcttgaatccggcgttcttgatttgttcgaaggttgatgggttctgcgtcaggtcgaccgccacataccgcactcccagtttggaaagctcttgttcggtggcctcgcattgaggattgttcggattggtgaagacggtcacggtcattcttttcctccctatgcaaatcggcttcctttggtgtggaaagccttgtcggccacgttttttgattttgcctggctgagcaggccgttcatcagtatacactacccgtagtggcgtttcgtgcgttcgcccactgtatatagtggggaatttcccgtaataccgaatctatgcgaacaaatgttcgatatattcgagtctatcattatcgtcgattgcgccacgccggttgcatgcgtatggtccgtccgcgaatcgcccgcgggctgttcgctgttcatttcggaacacatattgcgattttgctcgttttcttacgattgtgagcgaaaggtggtgccgcatagtgctgtagggggtataaatcgccttattttccatacttttcggcgcacgtcgcgaaataatcaaccgaaattgcgattcgtgagcgaaagagggtgcgcgatatggtgcgttccgtattgaagtgctgagacctcatcccgaaacaaatgaaaaagtcctgagaaccatcggcttccaggacttcgaacctgtgccccccgtgggattcgaacccacaacccacgacttaaaaggacgctgctctaaccgttgagctagaggggcaacagcaacacagtatacagcatattcggaccaatcgccaccacgggcgtcggacgggcgtcgaaatggccttcggagtgttggtgtgcctacaatcgaaaccatgtcatgtaccacaattcttgtaggcaaaaaagcaagttacgacggttcgaccatcatcgcccgcgacgacgattccggttccggccgttacgatccgaagaaattcgtcgctatcgcgccgcaagagcagccgcgccactatcgcagcgtgctcagccacgtcgaaatcgatcttcccgacaacccgtgccgatacagcatcgtgccgaacgtgctacccaaccgtggaatccttgcggaagcgggcgtgagcgaacgcaacgtggccatgagcgccaccgaaaccatcgccgtcaacgagcgcgtgctcgccgccgacccgctggtcgtattgcagccagccgacgaggccgacggcaagccggaagtgcccggcggcatcggcgaggaagacatcatcaccctcatattgccgtatgtcagcaccgcccgcgaaggcgtgaagcgcctcgccgaactgctcgaaacgtacggaacgtacgaatcgaacggcatcatcatttccgacgtggacgaaatctggtacgtcgaaaccatcggcggccaccactggatcgcccgccgcgtgccggacgacaaatgcgcgattattcccaaccagcttggcatcgactatttcgatttcgacgacgccttcagcgacgcgcgcgaattcatgtgcagcgacgacctgacggaattcatcgaacgccaccatctcggccgcgcggccggcacgcagggcggcatgaacaacggccactgcaacccgcgcgtcgtgttcggcaccgccaccgcgaaggaccatatctacaacacgcctcgcgcctggtacatgtaccgccagcttaaccccgtcgaagcggcagacagcacgcccgaatcggatgatattccatggtgccttgaaccggagcacgccgtgaccgtcgaggacgtcgactttttgctgggatcgcatttcgagggcactccgtacgacccgtatggcacgcaggggactgaggaaagccgccatcgctatcgtccaatcggcatcaaccgcaccgggcacatggtggcgatgcagatccgcccgtatgcgccagccgaaagccgttcgatcatgtgggtttcgtacggttccggcgcattcaccacgtccgcgccgttctacgcgaacgtcgacgatacccccgcatatctgcgcgacaccacgccggaagtctccacggactgcctgtattggacgaatcgtctgattgctgcgatcgctgacgcgcacttctacgagacgagcaatgcgattgaaggattctcggaagacgtccgctccttcggccaccgtttggtggaacgtacggatggcgagcttgcgattggtggtgcggaggcggacgccagtgctggttctgtgtccgtttcggtccgtctcgcggcggccaacgacgaaatggcggaatatttgcgatcgcgcaatacgaagctgctcggcgacgtgctgtatacgtccagcaacctcatgcacaacagtttcgccatgtcggatcgctggaactaagcccgctgacgcttcacgtgtccgattctggcccctgattgtccgattctggcgaatcggacaatcaggggccaatttcacctatctaactgtccgtttctcccgaatcggacacgtaggcatcaaaataaagcgttcctgtgtccgaatcaccagaatcggacacaggaacgcctggccaatcgcagtaatcgcgtgccttccataccgctataccgcgaaactcgcgcgaaatcagttgaatccgaccacgtgctccgccacaaaataacctttgcggatcacgaaccggccgagcgaaccgtgcaggttcagcgcacgtgacatcgccttcttgcgcacgtccgcgtaaatcgtcggcgaatacgccttgatgtccgcccaaagctgctttttcttctcgtaattcgcgtgatctcgcgagaggatcatgaatacgctcgccacggagctttcaatcgcaagaaaatgaatcatatagcggtacaggccgtccggcaccgtaccacgttcgggggtggcgcgcaccatgcactggttgacgagccgcagctggtccacacgtcggatcatcacgtccgtctgcacgctctgcccgtcgcggccgatgaaatagtggtagaacggtgtatccacgtattgcagcgacttgacccacgggaacggctggtacgcgtagatgaagtccacgtagaacgtgtgctccggcagctgcatcttcgattcgcgcaccacggccgtacggtagatcagcgcgtgcatgagaatgtattcggtcaggccgaaatgtcccagatcgtcccaagtgagccgcttgccgggctccatggcgtgacggaagttcacgacgtgcttgttgcgcttgcccaccttgtcatacacatagttggtgacgagcatgtcgagcggctcgtccttgccgacctcgccgcgcagcacggccatgacctgttcgagcgattccgggccgacccaatcgtccgcgtccacgaccttcacgtacatgccgctcgccgccgcgatgccggtgttgaccgcgccgccgtggcccttgttctcctgatggatcgcgcgcacgattcccggattgcgcgcctcgaacgtcttcgccatctccagcgtgccgtcggacgagccgtcatccacgatcagcacttcgatgtcgtcgttgcgcttcgacgcgatcaacgattcgacgcaccgttccaggtattccgtcatgttgtacgcgggcaccacgaaggtgagcgtcttcttctcctgcatattcttcctcggatcgggctcgtgtcgggccgtgcggctggccgaccgctccggccaaaagcataacgaaactaacgtagcaccatgtgcggttccggggcgcggttttgcgcacaaacggcaccctgaaatacgcaatctgcacctgaaatttcccctagggtcatttcgggtgacggtatgtcagttttcgtcaattgttgattgtttttgcgattcgtgcgggctttgcggtttttgcgattcgttcgtctcgtctgattcgtttgattcgtctgccgcttgcgatttgcctactgcttgcgatccgtccgtcacggtcgtcccgtccgtcgcgtcatctcccgcagcaaccgccttctcctgcgatttcgcggccttcttgccctgcttctcctgcttggcgatcgccttcgcttcccgcgcggcctgcttttccgcctcgcgggcggccttttcgctttcgtagcgcagttccggcttggcttccatgcggctcagcccataccatgccaggttcacgatgtgcgcggcgagctgctccttgctgagcttgcgctggtcggcccagtattggcaggtgtacacggtcatgccgatgagcatctgcgcgtaatacggcacgcttttggccggcagatgctggcgtttgaacgcgtcggtgagaatgtcctcgacgcgtacggcaatgtctccaagcagcgaattgaacgagttggacgggtcggttttcggcgaatcgcgcgtgagcacgcggaagccttcggcgttctcctccacgtaggtgagcagcgcaagcgcggtgcgttccacgatttggcgcggatgcgcctgcgggtcggacagcgcgttgatgagaacgtcggtgagcgcgcgcatctcgcggtccaccaccacggcgtacaggccttcctttcctccgaaatgttcgtagacgatgggtttcgacacttttgcggtcgaggcgatctcttccacgctcactgcttcgaatcccttggccgcgaacagcgatcgaccgatttcgataagctgttcgcgccgctggtacgacgtcattctggatgtattggccatattgcccagtttttcacgtcccgtggatagccccattgcctgccctggcagagatgagtggcgtgtccgttgcgctttttaggctggagtcatggataccaatgtgattattgcgattgtcgccgttgttgttattgcggcattgcttgcgattggcggatggtggttcggtaagagccgcaagtccgccgtggacaagtccactgaagcggcgaaggcgaaggccgatgctcgtttggctacggagaagtccgccgcgcaatctgccgccgcaagtgccgaaaacgctgagaaaaccaaggaaaccgcggaatccgcagcgacggaagtggaatccgcgacttcgtctgccacacctgaatcgccagtggcaactgaaccaactccggtcgggtcagccgtaactgaatccgcgaccccagccgtcgaaacccctgaagccgccggcacccgcatgcagcgcctcaaggcgcgcctgtccaagtccggcaatccgttcggcaaggccctgttcaacatcctcgccaaggaccagctctccgaagccgactgggaggacgtcgaagacaccctcctgctcgccgacgtgggcgcggaagccagcgaacagctcgtcgaggaactgcgcaacgacgcccgcatcgccggccagtccgatccggccgaagtgcgtgcggcgctgaaggacaagctgctgaagctcgtcggcaccgacgtcgaccgccgtctcaacgccgacaaggaaggcgcgaacaagccgagcgtcatcatcatggtcggcgtgaacggcaccggcaaaaccaccaccgcgggcaaactctcccgtctgcttgtctccgaaggcaagcaggtcatgctgggcgcggccgacacgttccgcgccgctgccgccgaccagctggagacctggggcgcgaaggtgggcgtaccggtcgtgcgctccgacaaggacggcgccgacccggcgtccgtcgcgttcgaagccagcgccaaagccaaggaagagaacgccgacgtgctcatcatcgacaccgccggccgtctgcagaacaagtccaacctcatggacgagctcggcaagatccgccgcgtcaccgaaaagaacctgccggtcgatgaagtgctgctcgtgcttgacgccactaccggccagaacggcatgacgcaggccaaggtgttcgccgaagcgatcggcatcaccggcgtggtcctgtccaagctcgacggctccgccaagggcggcatcgtcatctccgtgcagaaggagcttggcgtgcccgtcaagctcgtcggcctcggcgaaggcccggacgacctcgccccgttcgatccggaaggcttcgtcgacggcatcctcgcctgacgttcccatattttccggatttgcgatttccgtagcgaaaacctcccgtcacgttccgtacgtggcgggaggttttcgtattgcgattactgctcagcgccagccgtaccggcagcgccagcccccacccccggcaccttccggatcgtcagcttcaatagcagcggcgcgaccagtgtcaccagcgaaatgatgaagatgatcgtcgaatagtattcgctgccgagcacatgctcgttgaagccgatctgcgcggtaatcaacgccatctcgccacgtggcaccatgcccgcgccgatcatcagcgccgaagcgccgccgaaaccggccatgcggccacccaaaccgcagccgacgaccttcgtgatcacgccgagaaccgtcatgatcgcaatgaacacgatcatcttcgtatcatccacgcctgtggtctgcaggccgatgcccacgaagaacaccggcacgaacaacgtgtctccaaccggctcgatataccggtccgcgtcctccgcgtaatcgctgttgcttaccgcgatgccggcgaaaaacgcgcccaccgcgtagctcaacccggccagattcgacgcccacgccatcgccaggcagatgatcacggccatcaccgcgatgccggacggcgccttcagcacgccagccagcgtcatcagcgccggcgccacccaaaccaccaccacggcggccgccacaaagaacagcacctgcttgagcagaatcaaacccagccctgccacgtccacgctgccggtgttgacgagcgtgcacatcacggacagcaggatcacgccgatcacatcgtcagccacggccgcgccgagaatcgacacgccttccttcgaatcaagcagtccggcttccttcagcaccgccacggaaatcgacacggacgtggcggagaacaccacgccgatgaacgcagccggaatcggcttgaagccaaacagcaggctcactccacccatcaccgccacggggaacaccacgcccatgcacgcgatgatgaccgccgccttcgaatacttcttcagcaactgcaggtcgcagccgacaccgcccaaaaacatcaggatgatgatgccgaggtcgctgaacaatgacagcgaatcgctcatgtgcatcacgttcagcagcgaagggcccacgagaatgccgacgagaatctgcccgatcacttccggcagctgcgctttgcggcagatcagcccggaaaccgtggtcagcatcaaaatggcgcacagtgaaatgatgaacgttgccatggtcctcgccgctctctcgttacgcgcgtcatacgttcgccgcaccgcgcgttcggtgtacatgccacgcgctcgccgtacgcggcgttctcccgtcgcgtgccacgcgtgttccgtaagtttcagctacccaacttactccgtccgcagcgttgcccgccgcttccgtccaccgtcgcaatttcatattgcgattgccgggcgattatgccttccgtatttccgtaccgccagtttcgttggaattccgccatttttcggcgtaggttgacgtttcgcgcggatggcgttacgttggcgtaacacgtcgtaacgttttcaaaacgcggccggcgttccatatcgttctgtcagccccacacgatggggacggaaatgttgaaccaaatatagagaaagaaagaggagggtgacatgggccagcttgattctggaaatgccgcgtggatattgacttccgcgtcccttgtgttcctcatgacgcctggtgtggcgttcttctatggtggcatggtccgcgccaaggccgtgctgaatatgatgatcatggaggcggccgcactgtccgtcacgatgatcatgtgggtgctgtggggttggtcgatcgcctacgccggcacctcggtcggcggcatcttcggcgacccggcaaccggcttcctgctgaaggacaccatggtttccgataagggcgtcttcacatcggcggcgctgaacggcaacaactacccggtcagcgtggacgtggccttccagtccgcgttcgccatgatcaccgtcgcgttgatctgcggcgccatcgccgaacgtgtgaagtactccacgtggatgattttcgtggcgctgtggatcacgttcgattacgctccgctcgcccacatggtgtggaacggcggcctgctgtccgctgacggcgccatttcccaggcgatcggcgcagccgcccacgatttcgcaggtggtacggtcgtccacatcaacgccgcagtcgccgctctggtcatcgtgctgatcatcggcaagcgtaagggcttcggcacgcagccgttccgcccgcacaatgttccgttcgtcatgctcggcgccttcctgctgtggttcggctggttcggcttcaacgccggttccgccttcgcagccaacggcaccgccggctacgcgtgggtttccacgtccgctgcaaccgctgcggcaatgctctcctggggcttcaccgagaagatccgcaccggccactacaccgcaatgggtgccgcttccggcatcgtcgcgggcctcgtcgccatcaccccggccgccgatgtggtctccccgctgtgggccatcgtgctcggcgccatcgccggtgtgctcacctgcctggcttgcggtctgaagttcaagctcggctatgacgattccctcgacgtcgtcggcgtccacggcgttggcggcttcaccggcaccgtgctcatcggcttcttcggcgaaggcaccggcctgttcgcaggcggcgactggaggcagctggtcgtccagctcatcgtcgctctcgtggccatcgtctggtccgccgtcatcaccggcatcatcgccttcgctctggagaagacgatcggctggcgcgtcaccgaagcccaggaagtcggcggcatcgatcttgccgaccagggcgaacgtgcttacgattttgctggtaccgccagctccgtcctcaaggaggtgaagtgagatgaagctcattaccgctatcatccagccccataaactcgacgatgtcaaggaagccctcgcagccgcgggcgtgcacggcctgaccgtgtccgaggcaaacggttatggccgtcagcgcggccacaccgaggtctaccgtggcgccgaatacaccgtggatctcattccgaagatccgcatcgaggtgctgtccgacgatgccgatgccgaaaccctggttggcgtgatcgtcaagtccgccggctccggcaccatcggcgacggtaaggtctgggtggctccgcttgactcggtgacccgcgtgcgcaccggcgaaaccggttccgccgccatctgatccgtccggccttgtgatcgggccgattcggacaagatgaaataaagacccccgggcttgaagttcgggttatcaattacgacacatccccgtacgtgcctcgcgccgtgcggggattgtcataagtcgtcataggtttcataaggaacgtgcgttatgacttcagcagtcgatggtctcaaacaacggttcatggccatgagccagcccgacgccgacggcgtctaccgcaatggcgcggcgaaacgcaaagcccgcacggacttggccatgggcaatctcacacagttgtggaacgaagcctgcgagacggtttccttcgatgttccggcaaccggcatcggtctcggcgcggtcggttcgctggcacgtggacaggtaggccccagctccgaccttgatctggtggtcatctacgaaccgcacgcgctgaccgaccagcagctcaacgagctcgccaacaaactgtggtatccgatttgggattccggcctcgacctcgaccagtcggtacgtaccgtcgcgcaatgcgaggccgtcaccgaccgcgacctgcccgcagccatgggatggctggacgtggcgccgatcgcgggggacactggacttatcgaaagcacagccgtatccatattggaacgatggcgcaaggccgcacgcaaacgtctgccggaactgctcggcttcgccaaatcgcgcctcgacgaattcggccgcatggcctacatcaaccagccggacatcaaagaggcacgcggtggtttgcgcgactccgtattggtgtccgcgctcgccgcatcctggcttgccgaccgtccgcacggcacgtatgacgacgccgtcgaacggttgctggacgtgcgcgactgcatccatctggtcgccggcaaagatacgaacatgctgctatcgccctaccaagctaaagtcgcggcgatgctcggtctggccgatccgacgctgcccgatggcgaacgtgaggcgaagtcgatcgacgatctgcaaacgttgctggcacgcgtcggccgtcagatcgcgttctcccttgattccaccgcgtcgcgcgccgagcattcgctgacgcacgacaagccgcgattcgccttcttccaagtgttccagccgcgcggcggcggcaaacgtcaggcaccgaccttcgatgtgatcgcccccggcgtggccaagcatgaagaggaaatcgtgctcgctccgggcgcggaaccggccgccgacccgaacctcgtgctgcgcgtggccgtcgcagccgcggaatacggcctgccgatcgccccgggaacgttgcaaaacctcaaaaagtgtcctatcggcgaccgcaactggacggacgaatcgcgtgaactgttcatacgactgctggcttccggccccgcgctgctcaacgtgtgggaagacatcgatttcatcgacgtgcccggcaagctcatccccgaatggttgggcgtgcgcaaccggccaagcgcgtccgccgcgcaccgctatacgatcgaccggcacatggtggaggtcgtcacgcggctcggccgtgaaacacccagcggtgggcggtacgacgaccggcattacgaggcgctgctgctcgccggcatcctgcatgacatcggcaaacgaccgggggtggccaaccatgcggcggaaggcgctcggcatgcgaccgtggtcgtggaacgcatgggattcgaccgcgacatcgtccgctgggtcacgctgctggtacgcgagcatctgacattgtcggagttcgccacaggccgcaatcccaatgatcccaacgtcggcgatgatctggccggccggctcgaccataatcccgtgctgctcgacatgctgttcgacctgacccgcgccgacggctcctcgttgggggccacgtccggcgagaccatctccaaacagtacgggtggagcaaatggcgtgaaacgttggtgcgcaccatgtacaacgccacccgataccacatgtgagcgccggtttctcgcatgcgccaagccgatatgcccccgtatttctcgtcgtttacggaaaagcggggtgcatatcaccttccgttcacttcggcaaatcgaaataagggaatcggggtgcatgctttaggatgtccccaagttgtccactcagttatccccactctgtggataagtcgaaacgttttccacatggttatccccaatatgtggataactcggcttttttcgactttcttatccacaccaaagccattcgcgcgtgtcgttcggtggatgcggagattcatccataatctcaatgcaacaccggtcgtgacggcacgcacgtattatggttttcctcggtattgaacacattcgattgactgctgcggttggagggacatggcggagaacgactcttggaacaacggttcggcgcagaaccgcggattttcgaacgctggaaacggtgcgaacggcatgaacggccgatccagccaagccgtgcgcgacgccctgttcgaccgcgtgccgccgcatgacgacgccgccgaaatggcggtgttgggcggcatgctgatgagcaaggacgccatcggcgaagtatcgcagatgatcgacgtgtccgacttctaccagccacgcaaccaaaccgtgtacgaagcggtcatcaaactgttctcggcctcccagccggtcgacgccgtgctggtggccaacgagctgctcgccgaaggcaatctggaaaaagtgggtggctccgactatctgcacagcctggtcgcatcggttccgaccgccgcaaacgccacgtattacgccgacatcgtgcatcagcgcgccatcctgcgtaatgtgatcgcggccggcaccaaaatcgcacagctcggctacaccgcagaaggctcgcaggccgaagacgtcgtcaacctggcgcaggccgaagtatatgagatgtccaccggcaaagtgcggcaggactacgcgccgatcggcaccgtcatcgccgatacgcttgaccagctcgaccgtctgcaaagcggcgaagtgtcccgaggcgtgccgacgggcttccgcgacatcgacgacgtgacgcagggcctgcagcccggccagatgatcgtcgtggcaggccgaccggccatgggcaagtccacactcggtgtggatttcgcccgttccgcggcactgcatcacggattgacgaccatcatcttcagcttggaaatgagcaaaaacgagttggcgcaacgtatcatctccgctgaatccaacattccgctcgccgccatgcgccgcgcggacgacatcacgccggaacgttgggccatcctgaacgagttgcaaggcaagctgcagaacgcgcccctgttcatcgacgacagcccgaacatgagcctgatggaaatccgcgcgaaatgccgccgactgaagcagacgaacgatttgaaactcgtcgtcatcgactacctgcagctcatgacctccggcaaggccgtggaaagccgccagcaggaagtgtccgacttctcccgtgcgctgaagctgctcgccaaggagctggaagtgccggtggtggcgttgagccagctgaaccgtggccccgaaatgcgtcaggacaagaagccgcagctgtccgacctgcgtgaatccggctctatcgaacaggacgccgacgtggtgttcctcgtgcaccgtccggacgcctacgacaaggaggaccgcccgggcgaggccgacatcatcatggcgaagcatcgtaacggtccgaccgacacgttcaatcttgcgttccttggcgcgtattcgaagttcaaggacatgccccaggattaccagtcccagcaggaggcggtgtgatatggcttggaattccttcgcgaccccgttgatcggcaaggccgtgcgcgcggcctcccgtttggcgcacggcggtggcagcgcgttccccggcaaaatcgtggaacgcatcgacccgcaattcctgtcgcgcacattggcgcaactgccgctcggcgtggtgctcgtctccggcacgaacggcaaaaccaccaccacacgcatggtggccagcatgctgcaatcgctcggattgaaggtgttcaccaacccgaccggctcgaacttcacccgtggcgtggtttcgtcgctgcttgcggaagtctcgctttccggcaaactcgacgccgacatcgcggtgctggaactcgacgaggcgtacgccgtgcatttcgtcaagcaggtgccgcccgactactgcctgctgctcaacgtgatgcgcgaccagcttgaccgtttcggcgagatcgacaacaccgcgcgactgctgtccaaagctgcggaagccaccaccggtaccgtcgtgctcaaccgtgaggacccgcgcatcgcccgtcttgctgacgtggcgcatacggaagacggcgtggaagtacgctacttcggccttgacgaatcgttgcgcggcttcttcccgtcggatgacgacatgagcaccactgttgacgcggaagcgcacgacagtgcggaacatggcggaaatattggcgattcgggcaatgccggcgatactgccgatgccgttgcggctgccgcgccggccacatcgcaaccgcaggacggtcccgacgcgctgcccgccgacgtgacgttgcgcgccgtgggcgaccaccgcgccaccttcgcgatcgacggcgaaacgtatgagacggccgtgaaactggaaggcgtatacaacctgtacaacgcggccgccgcgctcgccgtggtgcgcgccgtcgcagcggacgcgcaggcgatgttcctgccgttcgaagacgcgctcaccgacagtgtcgacgcggacggtgccgataccggtaccgaaacggacggcaacggctcgcatgacgccatcgaccaggccgctgcggacgagattctgcgcgcggcaggcgtctcaccccgtatgatcgccttcgcgcacgccaccacgcaggccatgatcgacaccgccggcgaggtcacaccggcattcggccgaggcgaggtcatcaccgtgaacggcacccccgtggaactgctgctcgtcaaaaaccccatgggattccgcctgtcgctggcctcgttcaagcccgaaggctgcgacaccatgatctgcatcaacgacgaatacgccgacggccgcgacatgagctggctgtgggacgtggacttcacctcgctgcgcggcaccggcgtcaaagccgtgtccggcgtacgcgcgtgggacatggccctgcgcctcgaatacgatcaggtgccggtcgaatcggtcagcaccgacctggaggaatcggtcgtgaacttcgtgaacgcgaattctggcacccccaaacacatctactgcacgtacacggccatgctgaaaacgcgtgccgcgctcgccaaaatcgccgacgtggccgacgccggcgtgggcaagtgagcgccgcgcgaaacgaaaccgcgcaatcgcaaagcaaaacagcggaaggaagacgaggagacgatatgagccaggtcatcgacatcgtgtcgctgtatccgaaggatatgaacatctacggcgattccggcaacgtgctcgccatccagcgccggctcgcgctgtacggctacgagccgcgcgtacacgcctacaaccagggctgcgactggcccgagcacgtggacatgattctgggtggcggcggccaggacaccggccagaagaagatcatcgacgacttcttccaacgcgccgacctgctgcgttcgctcgcggcggacggcgtgccgatgctgatgatctgcggcctgtaccagctgttcggcgagtatttcgaaacggtcgacggctcccgactcgacggcatcggcgtgatcggcgcgtacacggtcggccaggaaacacgcatgatcggcaatcttacggaaacctccgccgatttcggcaagatcatcggctacgaaaaccattccggacagacgttcctgcgtgacggcgtgcagccgctcggcaccgtcgaacaggacggcaccggcaacaacggcgaggaccatacggaaggcgcgcgcgtccacaacgtgatcggcacgtacatgcacggctcgctgctgccgaagaatcccgcgatcgccgatttcctgatccgcaccgccgtcgaacgccgttacggcacgttcgatccggccgccgccggacagacggacgcgcaacgggccgccctgcatcgcatcgacgaaatcgccgaccgtgctcgccgcgtggccatgtcccgtccgcgctgacggctgccatgccggttcgccgacaatcgcaccgcccgtgctgaacgccggatatccgccattttttatgcgattgaccggtttcgctcggcgcagatgtgaagaaaatgcgatagagtggtaccaccatcacctaaaggaggacatcatggctgattttaattttggtgacggcctgcgcaaggtctttctcgccggcgtcggtgccttggcgaccactgttgagaagagccaggaaatcgttgacgacctcgtcaagaagggcgagctgaccgtcgagcagggcaaggccctcaacgccgaactcaagcacaaggtcgaagaggctaaggaagcccctgagtccaaggatgcagccccggccgaaaccgaagacaaggccgagtagctccagtctttcgtatcgccgtctgccgcgcatgtgagcgcccggacggcgatttgctatgcccgcgcgacgccggcgaaacgttcgtctggcatcgcgggctttccagccgatttcccaaccgtttgcgagcagtgacatgtctttgaaacacccatccgacaagccggacgcggcacgccccgaaagcgtggagcccgtcacgctgtccgacagggtcaacgcggtcatcaaccccacggccgacccttcgccggacgccgcctcccaagcaaacggactgacggatgagcttgcccacgaatccgcggacgatgccggcgaaacggacgataccggcaaagcggccggtgccaacgcacaatcgtccgaaaccatcggcatcttcggagcgcgcaaagacacgttctccgcgcgctaccatctgacccgccgcggcaaactccggcgtcttgcgcaaatcgcgcagatcgccaacaaattcgacgtggttcacggactcacgcccgtcaaaatgcgtctcatgctcgaagcgctcggccccacgttcgtcaaggtcggacagatcctgtccatgcgctccgaaatcctgccgcaatcgttctgcgacgaactgtccaaactgcgcgccgacgccgaccccatgccatacagcacggtgctgcaggtgcttgaggacgaatacggccggcccgtggacgagatcttcgaccatatcgaccccaccccgctcggctcggccagccttgcgcaggtgcatcgtgcgaaactgctcaccggcgaggacgtggccatcaaagtgcaacgtccgggcgtgcgcgaaaccatggcgcaggacgtgtccatcatgcgcaccatcgcgggaatcgccaccaaaaccatgcgcagcgcgcaggtggtggacctgtccggcgtggtcgaggaactgtgggacaccttcgaatcggaaaccgacttcctcatcgaaacgcgcaatctggcggaattcaaacgattctgcgaacgctacaaatacatggactgcccgaagccgtacccggaactatgcaccgaacacgtggtggtcatggactacgtggaaggcatctccgtctcccatccggacgagctgcttgcagccggctacgacctgaaggaaatcggcaccaaactcgtggacaactacgccacgcaggtactcgacgaaggcttcttccacgcggacccgcaccccggcaacatcatggtgcgcggtgggcagatcgtgctgctcgacctgggcatgactggccggctcaacgccaaaacccgttccgtgctgaaggacatgatcttcgccgtggccgagcaggattcccccaagcttgccgacggtctgctgcgtttcgccggtgccgaggccgatccggaggattatccggcattgctggccgatctggacgtgatcgtcaaggaattcggcacagtggacctggccgaactggacatcgccgccatgctgacggccctgacgcagatggcgcaacgccacggcatcgaagtgccgagcaccgtcaccacggtcggccgcgcgctggtcaccttggaaggtttgctcgacgagttcattcccgacgtgaacatgatccagatcatctccgaccacatcgcgtcgagcacgtcgaagaaggatttcgccaaggacgagacgaaatcgctggctctcgaaagccatcaggcgctgcacagtctgcttgccgccgccaacgagctgaaagtggcgtcccgcatgctcacgcgcggccagctgcgcgtcaatatggagatggtcggttcgcaggagccgatccacctgctcgccaacatggtgaacaggcttacgatggcgcttatcgtggtcggcctgttcatcggctcgtcgattgtgtattacgcgggcatcaagccggtgattttcggcattccgattgtcggtttccttggctacgtgatcgcgttcatcctgtccgtctggattgtgttcgacatctacttcaaaggacgcgattcgaagaagcggtagccgggcgtcttgcgttgcgggtggcttgtgttgcggcgcgctcgcattcgtgttggtgattgcgttcatatctgcgtttgcgattgcatttgcgttcccggattattcgatgggacacggctttttgctgaataatcagacaagttgtcaatgatttcactccccctaatatggacccattgacggggtactgttttggtggcataatgctcaatgtcgacgatgacatcaccacccggttcccatggaggagaggacatgcaggccgggaaatcccagcgaagcgtgctcgcgctcgtgatcacctgtgccctgattcttggatttggtatcccccttattccccttgtcggagtggattccgccgaagggacggaggtctccgccgcttccgacgttgccaccgtctccgccgcttccgacgttgccaccgtctccgccgcttccgacgttgccaccgtctccgccgaaaacagcctgcagaacggcagtttcgaacagccggacgtgtaccagtaccgtgaaaccagcgatgttccgtattggaaatccaccacgacttcaggcaacatcgaaatcggcagtgtcttcaaaaacggcaacggagacaatgactccctgcacatgcgcaccggcgagaaagtggccgcggccgaaggcagccaattcggcaagccggccacgtcgaacggcaactattcgatctaccagcggctcgccaccacacaaggcgcgaaataccgatggtccctgaaacacagggcgcgtccgtccggttcgaagagcggtttcgatacactcgcggtcatcaccgcggacacgcatggcgccgaaccgccatcgttctcatggggtggcggcaccgacctgttccacaacatgttcgagtggatgttcggcaacggttgggacagccccggctgggccttccctgacagcggcgaaggcacgttcaagctctgctccgccaccttgggcaacggaacggtcaacggctaccagagccactggtaccgcgccggcaatgactgctccgacaccgagcatttccccatcacctggacgatcacattcgtcagcagcgtcttcaaccagtacacgcgcaacggatggaacgaatacgaaggagaattcgcggcggacggcgacgacaccgtattcgcgctggcgtcctacaacacgctcaacggcaacctcgcatacggcaatctcgtggacgacgtgtccgttgccgcggaaggcggcgacggcggcaacctcgtgaccaacggcggtttcgaatcgccatcgcttaccaaggacggcgaaacgggctccgccaacgctccagccaacgccgcaacgcagcggcccgcaccccgcatcacgccgccgattggccgcatagcctcaccgtctcagtccgctaataaaaggcgattagccagtcttaccgactcggcaatcgccctcccatattttgtcccgcgaaagcctttcgaggccgacgtgggtgccgttagagcgtgggaatcgccatatgcaacggcgaaactgaataatcggtgaaatcgtgagcgaaaaccggcaaactgggctacgctcgtaacaagtggctcattgcgcgcgcaaatgcggtgagcagggtcaatcgcaagggaggatgcccatgtcaaagtcgtttctcaagaaagcgctgctcggcggtgcggtggcggcgggagccgcggtgtgggcgatcgccccgcgttccttctccgacaagcgccgtcattatgtgccggccgttccggacgtgtggtacgcgcaccgcggtctgcatgacgccggttccggcctgaccgcgcaatacgccaacgaaagcggcgaatacgtggcgctcgcccgccgcatggccatgaaagccgggtacggcagccctgatacacccggcgtgattgcccctgaaaactcgcttgccgcgttcgcagccgcctgtgaagccgggtacggtatcgaactggacctgcagatgacgcgcgatggcgaggtcgtggtggtgcatgacggcgacctgatgcgtgttgccggagatccgcgccgtatcgccgatctcacgtatgacgagctgactcgtattccgctgttcccgaccgatgcaccgggtgcctgcaaagccgcgccgctgccgttggcattggagaatccgccgctagtcaccacgccggacaacgcgccggaaggctactaccagcatgtgccgctgttcgccgacgtgctcaaagtggtcgccggccgcgtgccgctgatcgtggaatataagttcgatgacaactccaagtgggatccgcgcgacgtggagcttatggagaagggcgacgcgttgctgcaggcatactccggcaagtatgtgatcgaatcgttcaacccggccgccgtgaactggtacaaggagaaccgtccggaagtgtgccgcggccagctgtcttggtggccgtacggcgaggacaagcccaccgatccggtggcgctcggcaaggaatacgcggccggcgcgctggtgttcgactggatttcccgtcctgatttcgtcgcctacgattggaagggcggcaacagcccgcaggtgaagctggcccgattcatgggcgcggtgccggtgtcgtggaccgtgcgcagccgcgacgaatacgcgcagtgctgcgaccagttcgaccgccacatcttcgaagcgttcgtgcccgacgaacagtagccgactgatagttgcccggcgagcgacagcagccgggcgctagtcgacggactatgatcgacaggcgacagccggttttatatggtttcggcctgccatcgcatgattggtgcggtagcaggctgaatttttattcgattgatttattccgattggcagctcagtcgatcacgccgtacagacggtcgccggcgtcacccaagcccggcacgatgtagcacttgtcgttgagcttctcatcgacggcgcacagcaccagcttgaacttgatggacgggtcgaggttttcctcaacgaacttcagaccttccggagcgcccagaatgcacactgcggtgatgtccttcgcaccgcgctcggccagatagtgggtggccgcaacgagcgtgccgccggtggcgagcatcgggtcgatcaggaagcactgacggccggtgagatcctccggcagacggttcgcgtacgtgatctgctgggtcgggttctcctcgtcgcgcttcatgccgaggaagccgacttcagcggacggaatcatcttggtcatgccgtccagcatgcccagacccgcgcgcagcaccggcacgataatcggagccggggcggcgatgtgcttgccgatcatcggagccaccggggtttcgatgggcttgtccacgacttcgatgtcgcgggtggcttcgtaggcctcgagcatcacgagttcggaaacgagctcgcggaacgtggaggacggagtgttcttgtcgcgaagaacggtgagcttgtggtccaccagcgggtggttcaaaacatgaatatccatggtttctaagcgtagtccatgtatcggctgttcggcaacgcgccggtaggtcggtcagatgaaacccagatgagcgccgatcggatggcaatcgaaaatcgcaagaaagccagagaaaaattcgaaaaacatcaaaagaggagaaaagcgccgaaccacgaaagcgcctgtcggcgcaaaggccgctcgcagcggcaaaaaatggagcccggggctatgcatggcccggcgcgaattcctattgtacagtcgcgctcgacgcttcgcagcgccgtgtcgtgtggggtatgaaacgggggaaaattacggaaagcggcggtggaaagcagtagtggaaaacgacagtggaacggcctattccaatcgtccgcgccgccacagattcgccccgtggcggaaatccttggccgtggcgaacaggttgccggctgtgtgcatcagtttcgcagccttcgcgcgcgcccgcttctcaacggccgacgggtggctgccggccgcagcagacgcagcggaaccgtcggaaacatcagatgatccggcctcgctggaaccgcccagcgaagccagtttgcgcgcttcgatacgcaatcccaacgcaaccacgtcggtgaaggcggcggcccgctcaagtgccacggcgaaatcgcctgtaaacgcgccggccaaaatcgaatcggcggtacgtgcgatgtcgtcttccgtcggtgcctggtccacgccggcaatcgcggaagcggtggtggcgacgggctcgccgacgcgccacagtcgcgcgatcgattcgcggttcttccgcatccacgtacgcagcagatacagtcgccacagaatgcccggcagcgagtcggggtcggcatggctccacaattcggcaatcacgtccacgccttcgcggtccaccagcgtcagcacacgttccaccagttcggcgtcctgcgtgtggtgcacgcggtcaagcagcgccgcggccgacgcatggcacatttcgttgatttccgccggatcggcgccgccggcgatattgtcggccatcatctggtcgagctggccggggcgtgccggacgcggcgaaccggtgttcgtgaaaccggcggaacggctgggaacgactgaaccggaaccgtagtgcatgttagtagacaatgggggagaccttctgaatgtcgatgatgctggggccttgcggtgtgtcgatgatgaacagcgacatggcggtgccggtaggcatgtatggcgattttgcgatgagctgcttggcaagctgcttacgcgcgcacaggccgcgcaaatggtcgtacatgccgccgatgaccggccggtgcatgcagatggccgtggtttcgcggctgttgagcgtctgcgtgatctgctcgcggaacgccagccatgaggccgccggatgctcggcgaacgcgtcctccgtcaacgcgttgatgtgttccatcggccgttcggtctgccagctcagcacctgcaacgtctcctggcagcgcagccacggcgaggtggccagtcgcgtcgggttgaaacaggcgagctcgcggttgagggcaaacgccatcgccgcgcctttcggcgtgatcggacggttcgcgtcggtgcccttccacgacttgcgcgattcagccttcgcatggcgtacaatcagcagattctgcgcggtcgcgccaccctcctgcacgcggtccacgaacactgccaacgtgtccttatcggtcgaatgagacagtattttgcgcgcctcacgcacggaaacccagacgatatcgttgatctcgcccacgtccgcgcggtgcaccgggccgaacgcgtccagcagatgttcggcatcgtcggcggaaatcggctgcgccatccaatacaacgtgtgcttggtgtcggccgtgcaatcgtgcgaatgccgggtcttcttgccctcttcggacaacgggtattcgacttcgcacagatacggtccgagtttgaccggcgaccccgtctcttcgccgatttcacgcaccgccgcatgccgatgcgtctcgttctgctcgagcttgcctttcggccagctccaatcgtcatacttcggacggtgcacgatacatacttcaatgctgtcgagctgttcctgcgcagatttgctactggcgatcgcaggatcgttcgcgatatcgctgcccgccttccatcgccatacgatgccgccggcggcttccacgatgcgtctcatcttttcgctcatattgtcctattctaggctgggccgggctggcggcggcgcgtgacgtccgaacatacagaaaatggccgggcccgcaaggtgcggaaccggccattcgcctcgatcgatcagtgccttaccggtcgacgcgtgtgtttcttgatgaggtattcctggctgtcgaccagcggtcgaccttcctcatccttgcaatggcgcacataggtgccatcggcctgcatatgccaagacgcggtggaatcggccatctgcagatcgacgtacttgatgagctcgtcgatctgctccggagccacgatgcggaccagcgcttcgactcgacggtcgaggttgcggtgcatcagatcggcggaaccaatccacacttccggaccggccgcagggccttcgccgatctgcggaccatcggagttggcgaacgcgtaaatacggctgtgctcaaggaaacggcccaggatcgaacgcacgcggatgttctcggaaagtcccggaacgcccggcttgagcgcgcagatgccacgttcgacgatgtcgatcttcacgccggcctggcttgcacggtacagcgcgtcgatggtcttctcgtcgacgatggaattgaccttgatcttgatccacgcctccttgccggcgcgtgcggcgtcctcctcgcggcggatgcgctgaatcaagccggaacgcacggtgcgcggcgccaccagcagacggtggaagctcgacttcggcgcgtagccggacagctggttgaacaggcgggtcatatcctgaccgaccaccggatcgcaggtcagcaggcccaggtcggtgtagatacgtgcggtcttcggattgtagttaccggtgcccacgtggcagtaacgacgcaggccgtcggcttcctgacgcaccacaaggctcagcttgcagtgggtcttcaggccgacgatgccgtacaccacgtgcacgcccgcgcgttccagcttgcgggcccacgcgatgttggcgtcctcgtcgaaacgcgccttgatctcgaccagcgccagcacctgcttgccggcatgcgcggcgtcgatcagcgcgtcgatgatcggcgaattgctggacgtacggtacagcgtctgcttgatggccagcaccttcggatcggccgcggcctgcgccaggaacgcctgcacggacgtcgagaaggaatcgtacgggtggtgcagcaggatgtcgcgctcgcggatggcggcgaaaatgtcctgcgcacgggacgattcgacttcggcgatctgacgattggtggtcggaatgaacggacggtacttgagatccggacggtcgatgccgccgagctcgaacagcacggtcgcgtcaagcggcgccggcaggcggtagacctcgtcggcgctcacgcgcagctggtcggcgagcagctgagacaggaacgggctggtctcgtcggagatctccaaacgaatcggcggtccgaaacgacggcgcagcagttccttctccatggcgttgagcaggttctctgcatcatcctcttccacgtcgatgtcctcgttacgggtgacgcggaaggagcgggcctccttgatgatcatgcccgggaacagggattccaagtgggcgatgatcaggttctccatggtgatgaagccatagcgcacgttggtgctctcgtcttcggtcagatcgtcgaccggcacgagtcggttcaggttgccaggaaccttcacgcgggcgaagtgggatttgccggatgccggattctccaccagcacggcgaggttgagggaaccgccggaaatgtacgggaacgggtgggccggatccacggcaagcggcgtcagaaccgggaacacctgctggcggtagtagcgcgacaggcgctcctgctcggccgcggtgagcttgtcccagctcagcagcacgatctgttccttcgccaggtcggggaggatgtggtcgatgatgtagtgcgcgtgctcgtcctgcaggcggtgggcctgctcgctgatggcgcgcagctgctgcctcgggctcagtccggaagcggccgtcacggcgatgccggtgtcgatgcggcgcttcaagccggccacgcggaccatgaagaactcgtcgaggttgttcgcgaagatcgcggcgaagctcgcgcgttcgatgaccggcaggtcctcatcctgtgcaagctcgaggacgcgcttgttgaacttcagccagctcagctcacggtcgaagaaacggtcgttcggcagcggttcctcgcctgcctgaagctcgcgcttatcgttcttatcggtctcagcgatatgctcagctatctggctgcgcaggatcgcctttgagggtgcgtcaaaaatctgtgccatagttatctactttatcctcaagtgcttggaatgtcttgcaaaactcaggaaaattaagcaggagttaacattcgttcgccgagttggtgaaatatgcttccgacacgccgttttttcggggcaaatgaacgtgaatgaacaggcaagcgttgcgattcgcacagcatggagcatttttgcgattcttgcgatcggaaagcaacagttgcgataaatacggaacatcgtcccgtttcggtttgcacttgccgcaatggcgagcataattacgaagtacaagaacaactgaagagcagagccccacaaggtgtgtatgaccgagataggttgttacgttgaacgggcattggatagacttaccgttacgacgatgttgttgtgcagcgattctgctccgaagattcttgcaggaaggcccgcttcggcgggtcttccttttttgttgcgctgcgccgtgctgcgttgcgtaatgtcttgcgatgtgccgaatcgcgttgcgatgtggataagtgtggatgacacgccgagggtgtggataacccacattctccgaccacaggtgccgtttcggcttgaatccatgtgcggtttcgtttttcaatcggcggtatgagcgatgcaatttcttcattacaggtccctccggtcccattgccgtcatacggaggccgtgacgcacgcgtgacgtgttcgccgaaaatccggtcgcagccagcggccagagtgcggcagccgactcgatcccagcaaaccgttcggcgggaaacagccccgccgcaacggttctatacgccacagaacgccatggacgcgcgaacgtcggcacgatgggccgggcctgccgtggcgggcggtttcatgggttcgccgttggaatcgtcatccacacggatgaaacccgttgaagcgcaaccggaacctgctccacgcaacgtcgtggtggtcggatccgccgtcgccggagtcggtgccagcacgttggcggcgctgctggcccgcgaactaacggaacgtggatgcaaaagcgtgctggtagacgcagatctcaacggtggcggtcttgacgtgctgctcggtgtggaagatgaagacggttcacgcttcggagacatcagcgccccgctcggcaaagtggacggcaaagcgctgctgcgagaactgcccgtgtgggatggcgtgccgctgctggcctgcaatccctggcgaagcgaaaacccgcaatcctgggagatccaggcatgcatccgcgcgctcgcgcaggtgaaggacgcggtgatcgtggacgccgggcaatggcgtggactcgatgacgttccggaactggcccaggccacacacatcaccgtggtcgaaatgacggtgctcggactggcccgagccaaagtggccatgaaatcgcgtggaacggcggaacggcagaaacatggccatatcgtcggcgttgaaccgcgcggcgtggcgcgtggacgtggcgtgaccacgctggaagagacggaaaactatcttggccattccctcgcggcggttgtcaaaccggacgccaagctgtgcggcgaactgctggacggcctgggcctgcgcaggccgaaccgccaaaccgtcaaagccttggccgcgctcacggatgaactgcaggaatcgttggaaggcaagcgggtgaagcatggaactcggaccccttagcgccatcgcctcgcagccgggcgtcacggacatcgcggtgacctgcgacggcacggtttgggcggattgcggccaaggcatgcaggaagtatgtctgctgcgccgatgctttccgtcagcgcagtcgattcgtgaattcgcagcgcgattatgctcgcaacttggccgacggcttgacgacgcctgcccgatcgccgacgcctccaccgtggacggtctgcgcgtgcacgccgtcatcgcaccactggtgccgcaaggcgcggccatcagcatacgattgcccgacgcggtctcgcccgatctggaatcgttggcgcgcaacggcatgtttccagccgaatggctgcccctgctggccggactggtgtcccgcaaggcaagcgtgctggtgacaggcggcaccggtgccggcaaaaccacgatgctcaaagccatgctgatgcgatgcccgccgaacgagcgcatcgtcaccgtcgaggaagtacgcgaattgggcatgatccaacatgccaaccacgtgtctctggtcacacgcgaagccaacacggaaggtgccggcggcataggcctttccgaactgatctgcgcgacgctgcgcatgagaccggaccgcgtggtggtcggcgaatgccgtggcggtgaagtcgtggatctgctcagagccttgaattccgggcatcgaggcggcatgaccacattgcacgccaatcaagtggaggcggttccggcgcgattggtctcattgggtttgctggccggattggagccacgcgccacggcggcgctcgccgaggatgcgttcgacgtggtgcttcatgtggaacgtatcgccggcagacggcgcattgcgcaggtcggcagattggaagcggtggaagggcgattgcatgggcgtctgctggccgcctgggatggccgtacggtccgtgccggccaacgttgggatggattcatgagccgatggagcgcatgatgcgtgatgcgtgtggttgggaatattgcgccgcatggctggcgtcgatggccgtctggctgtggctgaatcggaacgcggaatgggcgggattgcggcgattacagcgtgtgctggttcgcttcgggcttcgttcggctgacgatagcggcggggccgatggagatggaacttgtgatgatgaatccgacgggcatggcagaacagtccggaacgatggggaaaaccgggatgcatcgccacggatgccgaccatcggcgctgccgcatgcgtggccgcgctgcgggcgtccgtacgcagcggagccaccttggtccaagcgttcgaggaattacagggcgctcctttcgcagtgcctgaactgacccgtttccgtattgacatggccgtacgaagccgctgctcgcttcaggaacaacacaagcatgtggatcagcttggtgcggaacttcatgcggcctgcacgttgagtctgcagttgggctgcgagatgagccgatgcctggaggccgtcgcggcgtcgttgaagcggcgacggctgctcgacgacttgcgtgccaacgcttttgccatgccgcaggccacggtgaagctgctgatggcattgccgttgctgacggtgatgctaggggaatgcatgggagcccatcccttgcgattccttgtggaagacgtgaaaggatggatgtgcctcggcttcgccggctgctgttatgccgtcggctggtattggattcgcaggctgatgcggcaggagcatgtgcgatgagcttggcatggccgatgctggcagcggtgggcgccgctggcgcgacatggctgtatgaatggtcgccggccagaaatccgcccgattctggcgctgtgcggtcatgcgatctgccattgcccttgatattggaaatgttgagcgtggcgatacgtcaaggagcgtccattccacgcgcgctgattgcggtcggaaacattgtggaaggcgagttcggcggtggattgcgctcggctggagaacggctgaatagtggcatgccatggaatgaggcatggcctgacgatgatgattgcgccgtggtccgtgacgcattctcctcatcatggtcgagcggctcctcgccggtgaatcggttggcaaccgcaatcgagcagctggattgggatgaacggtcgcggattgaacagtcggcggcgaaactgtcgattcggttgttgctaccgaccggcctgtgcatgctgccggcctttgtcgccattggcgtgattccggcggtgatgtcgtttctgtagcggccgattcgccatggggtagtgcgggttggtgcgaattggctcaaatttgctcgaatcggaccgcggtcggaatgacggatgatgcgcggtccgttccgtcatgccctaatcgcttgtggataagtgtggatgacacgccgagggtgtggataacccacgttcttcgaccacaacccacgaaaaccatgccatcgccgatgccaatacctgacactgagcgtacccggtcaatcggccgggattagccgaatgaaaggagcgtcatgaacgacgcaatgtcaatcaatgtcgatggttcgccgggtctgatgggtcgcgtcggccagaagttatgtgcggccaaggaacgtgccaataaggcggtctgcctattggacgtgcgcatgcgcctgctgaccgccgagccggagaagggcgcggtcaccgccgaatacgcggtggtgctggtggcggccacggcattcgccgcggttctgatcgccatcgtgaaatcggatgtcgtgaaaacgctgctgaccggcctcatcaagaaagcgttgagcgtggggtaaccatgcttgcgcgatggtggagacgccatgcccgtgacgccgattgcggaaccgtcaccgccgaattcgcggtggtgcttccctgcgtggccgcggtggcgattctggtgctgtgtttggggcgtgcctccatagtgtccatgaactgtcaggacgctgcggccgccggtgcgagggccatggcgattgacgccggcggcgaagcgaaagcccgcgccgcggcgcaaaccattgccggtggcggttccacggtgtcgttcgccgccaatgcgaacagcgtcaccgttgtggtgcgttgcccggttgcggcggatccgaccggcgtgctgcccgccagcgtcgtgggcaaggcaactcggtatttctgattgcgatgttcatgacagcgtgctgtccgtaacggtttttgaaaggcttccaatgcgcggcaagaaaggaacgacttccgtgaaacatgacgtgaaacagtatgtgcgacgtgtgtcgcatgtgttgaaaggcgcggacgaaggtgccggaaccatatcgggagtcgcgctgatcgcaatcgtcgcggccatgctcggtgcggtcgccatggcaggcaatctgctgctgtgcgtgcatcgcgcgcagaatacggccgacctggcgtcggtggccgccgcgcagtcgctgcgtgacggtgccgccgacccgtgcgcggccgcatcgcgtacaacgtcgggcaatggaacccggctcgaatcctgtgccattgaaggcgaggatgcggtggtcgccgtgcaggcggccacgcaggtgccgttcgcaccgtgggtcgtccggcagtcacgtgcggggcctattgcctgtgattaggagattgccggacagtcgttgcatgacggcacggaatgttcagctgaaggtaatgggcaatctggcgcttgacgtgaaacatggttatcgtacaagtatgagcaagacgtcacatgcgaatacgaccgttgccgtggtctgcaatccgacatcgaacaaaggcaagggcgcccaagtgggcggtcatgtcattgatctgctgcgcggagccggacgcaagcatggcttcgacgtaatcgatgtgaccggcacaagcttcgacgattccctggccaacgcccgccgccgcggcgacgaatacgattatctggtcgcggtcggaggcgacggcatggtcgcgttaggcgccaacgcagtcggctgctccggcaaaccactcggcatcgtggccatcggctccggcaatgatttcgcacgcggactggatttgccggtcaatcgcgtcgaaaccgccgttgaaggcattgtcggtgcgattgtgcgcggcacgcatatcgacgtggacatgggcttggtgacttcgttgcctgacggtcatgccatcgattcgaccgacggaaccgatgtttcacagtcgcgctcgccgatcgaccgctattatgcgggcatgctgtcgtgcggtttggacgcaagcatcaacgaccgcgccaatcattcgcatctgccgaatggctcgctgcggtatttcgccgcggtcatcgtggagctgacacgcatgaaaagctacggataccacatcaaggccacgctggccgacggttcggtggaggagcgggatatcatctcgccactgctcaccgtggccaattcccgccatatcggcggcggcatcgaggtgtccccgtattcacggttcgcggacggactgcttgatctggtgtggcttgaccatgtgccgaatttccgggagtgtgtggacgcggtggcacgcgcctaccacggccgactgctgggcagccatgctttcggatggaagcgggtgcgcgacattgaaatcacccgcgccaccgaaggggatgagcctccggtgttgatggccgatggcgaatacgtgggccatttgccggtgaaggtcttagccaaggacagtgcgctgcgtgtgctggtgccgccggccgtggcggaagcgcaggcggccgacagcgaggaacgggtgttggaaaccatcaaacgtgacggtcgtgaccctcttaccggtagattcctcgcctgacgtcgttttccgtcagccagccggtgccgctcgatgcccctccggacactgaacggccgttatatgttgcttgccggcggaaatgatgcgtgtgggagcaccgtcacagatattcgtccaaatgcagcgtctgtgccgccacctgcctgacaatgtcatcgtcaatgtcaggatgcagtctgatcagcgagatcaagccgacgatcagcgtgtagaaggtctcatgctcgttgcggatcggcatgccgtgcttttcctcgaattcacgtaccgtggaaccgcacaggtattcggaaatgcggtccgcggcccggtcgatgaacctcagatacagtgcagcgttgccatcctcgatgagacgttggctgaacgggccctcatcggcgatgagcgaacgggtcagccgcaccacatcgtcaagcgccttcgagatgttgccggcctcgcgatgctcgttccactcttccaggcgggcgatgacttcgctgatgacatcgtcgagcacggcacccgcaacctggtctttgtcttggaaatagtggtagaaaagcgatctggtcatgccgacccgttcggcgatatcgctgatcgtgatcttcgaaaaccctttttccaagcagatctcacgtgccgcctgcacgatctgcaagcgacgcgcgtctccaatggtgctggtggacgcttccggtttcccggtcatggctctctcctcccaatcgcgtggcaacgccttgtgcggcatggtggtgacgcacgggttttaggcgcgcaacagtcagcgttcgtgaccgacggcacgccgatcacacggttcatgtctgatttccagagtaccggctgcgccggttgtagatcagacagacacgcgatggacttgcggagatggtcggcttcggcgcttcccgattggcgaacgtgtcgtaattcatcgatactctagaacactacggcggaaggaatttgcgatggcactggcactgtatagaaggtatcgtcccgacacgttcgatggcgtgatcggacaggatcaggtcacggttccgctgatgcgtgcgcttgacgagaacaagctcacgcacgcctatctgttctccggaccgcgcggctgcggtaaaacgagttccgcgcgtattctggcccgttgcgtcaactgcgccaaaggtccgacctcgcatccgtgcggcgaatgcgccagctgccgtgaccttgccaccggcggccccggctccatcgacgtggtggaaatcgacgccgcctcccataacggtgtggacgatgcccgtgaactgcgtgaacgtgccggattcgccccggcccgcgatcgctataaaatcttcatcctcgacgaggcccacatggtcacgccgcagggcttcaacgcgctcctgaaaatcgtggaggagccgccggagcatgtcatgttcatcttcgccaccaccgaaccggacaaggtgatcggcaccattcgctcccgcacccaccactatccgttccgtctggtgccacaggaggtcatgggcccgtatcttgagcagatctgcgccgacgagcatatcgaggccgaagcgggtgtgctgcgcttggccatgcgtgccggcggcggatccgtacgtgacacgctgtccgtgctcgaccagctgatggtcggtgccgtcgacggcaagattccttacgattccgctgtcgcgctgcttggtttcacgccggacgcgcttatcggcgaggcaatcgacgccgtcgccgacaagaacggcgaggcgctgtatggcgtcattcaaaaggtcgtggtcggcggattcgacccccgacgtttcgttgaggacctgctggcgcgcgtgcgcgacctgttggtgctcaccttgggcggtgagcgtgcggaaagcgtgctgtctgacgacaccgcgaccgagaacatggacgatctgcatcgccaggcggcttcgctgggattggccgcgcttacgcagatggcggatacgatcaacgccacgctggccaacatgaccggtgcgatttcgccgcgcatgcgcctggaactgctcgccgcccgcctgcttgccggtcgtgagacgggcgtggtcgcgcaagccgccgcaccatcgtccggcatgccggaagctgggcatgcgggcggtgccgcagcgtctgaatcgcagcgtccgtccggttcccgtaggtacgccgcgcaatcggcacgtggaaggcatgccgtggaaccgtccgcggctcccacgaatccggccgatgccgtcgtttccggagcggcctccgtattggcggaagtccagcaggcgatgggtggacctctgtcggaaggcagcgagccggccgcttcagccgagtccaagccggttgaaacgcagtctgcgccatccaaactatccaatgccgaagcttccgctcccacccagtccgtggctcagtccgcgccccagcctgcggcaacggacgatcgcactcccgaccagaagtgggacgcgatcgttgccggcctgcctgaggatgtccgtcgctacgtggaccgcgagaaagtgccccgcgtgctgctggacggggccaaaggccgactgtggattaaattcgacaagtcgttgagcaaatacgcgttcgccaaggctgtggccaaggaagcggtcgacggcaccaccaatgtggtgcagatcgtgcgcggcgaagtgcataaggtgttcggccccgatgtcactctcgcgccggccaagaagcttgccgacggttccaccgcggtgccgtggagcaagctcagcccggaagagcagagcaagatcaacgcgcagctggtgcaggaacagctgaaggccgccacattgctgaccgcgaacctcggcaaggaggttgccaaggagccggaagacgacgatccgtggaacaccccaattccgcagacgcccatcgccgaaggcaacgccaacgacgtacagccgccggaacaccacgtaaaacatgtggacgtgccggatgtgagcgatgacgtcgacccatgggccacaccactgcccacgccgcagacggacggccaggagcaaggccaaccgaatgggccggagcagctgcggcaaaaccagccggaacagcacagcgaacgacatagcgcacggcaaagcgcccgcgaaatgcaatcgcaacaggcccagcagccggcatcatcgccggcaggattcgcggatgacccatggggagcccccatgccggtgcaggcgggaccgccggagcctgaagtcgccccggaagacgacgaatactccatgagcgacgaatcgatcggcgcatcgaacgctttggacatgaacgacctgaacagggtgttcgaagtgaagaaagtcgaggaattcagctcggacgatccgcataatccgcgcaacatgcaggtgaagaaaacacttgacgactgacaccggccaccgcacgtcgcatgtcgcttatcgtatggcgagtaccgggcgctggccatcagacgtcagttgtccggaacgtggctgcggcaaccagtcaacgaaaggtatgaaccatggctttggcctatgacggcgccatccaacgactcatcgacgcgttcgccaacctgcccggcatcgggccgaaaggcgcgcaacgcatcgccttctacctgctcaacgcgcccgacgaggaatcgcaggcactgatcgacgccatcacggaagtcaaggaaaaagtacggttctgcgatatctgcggcaacgtgtgcgaaaccagcccatgcccggtatgcgccgacccacgccgcgaccacagcgtgatctgcgtggtcgaagagccgaaggacgtgatgagcatcgaacgcacccgcgaataccggggcatgtaccatgtgctgggcggcgtcatcaacccgatggccaacgtgcagccaagcgacctcaacatcgccaaactcatcgaacggctcaaagacagcgaagtcaaggaagtgatcctcgcgctcaacccgaacgtggaaggcgaggccaccaccagcttcctttcgcagctgctgagccagaccgacatcaaggtgacgcgccttgccagcggcctgccggtgggcggcgacctcgaatacgccgacgaaatcaccctgggccgtgcgctcgccggccgtcgtgccgtctgaacgggtcccgaatgttccgtatgttgggcgcgtccggacttgacaaatcaggtttttcctataatgaacttcacttgccgaatcaggcaggtgatacgttgaagaagattggataagttgtggctctcatcgtgcagaagtttggcggctcttccgtagccgacccagaatcgattaagcgcgtggcccgacgcatcatcgaaacgaagaacgccggcaatgacgtggccgtcgtggtctccgccatgggagacaccaccgacgacctgatcgatcaggcgctcagcatcgattccaacccgccggcgcgcgagatggacatgctgatgaccgcaggcgagcgtatttcgatgagtttgctcgctatggcgattcatgcggccggttctcatgcatactcgttcaccggttcccaggctggtttcatgaccgacgcgcagttcggcaccgcgcatatcaaggccgtgaagcccgatcgcgtgcgtcgtgcattggataagggttccgtggcgatcgtggccggtttccaaggcgtgaacgaaggcggcgacgccaccacgctcggccgtggcggttccgatacttccgcagtcgcgctcgcagtggcgctggatgccgacatctgcgaaatctacaccgacgtcgatggcgtgttcaccgccgatccacgtatcgtgccgaccgcccgtcgcattcccgttatcgactacgaatcgatgctggaaatgtcgtcctgcggttccaaggtgctggcattgcgttgcgtggaatacgcgcagcgattcggcatgccgttgcacgtgcgcagctccttctcccaccgtcgcggcacgctgatcgtgccggaaggcgtcgatccgcgcaccctgccgaacatctgaacggcagccgggcagcgtaatcgcaggcaatcgcaaataattgcaagacaacgcgaaaacgaaaataagactttacaaacaaaggtaagaacatgagcgaaaacaacaaccagtccatgggcgacctgttccccgacctggggccggaagtgccgatcatctccggcgtcgcgcacgacagcaccgagtcgctggccaccgtgcgccgcgtgccgaacgagccgggcatggcggcgaaggtgttcaccatgctggccgaggccggcgtgaacgtggacatgatcgtgcaggcctccgcctccaccggcaccgccgacatctccttcaccgtgccgggcaccgctgcggccaaggtccaggaagtgctgcaggagaagcagggcgagctgggcttccagtccttcgacgtcgacccgaacgtcggcaaggtggccgtggtcggcgtgggcatgaagacccattccggtctggccgcgaagttcttcaacgcgctgagcgacaagggcgtgaacgtgctaatgatctccacgtccgaaatccgcatcgccgcgcttgtaccgctcgagcagctcaacgacgccgtcaaggcgctgcacaccgcctacggtctggacgccgaccaggtggaagccgtggtgtacggcggcaccggccgctgatagtgctggcttcagtttcccagtatttttaaagggcatggttttgcgaccgtgcccttttcgtttgctttttacgattcacgccgtacgttgcataccgtgccaagcagtccccgaacaagcaaaaggccggctccgaagagtcggccttttgcttggctatggctcgtttatgcggcttacggtttagctacccaagccgcataaacgtcgcatcacttattggtgatgtaacccaacgccttaagcatttctgcgctttccagcgcgccaccggcggcgccacgcagggtattgtgcgccaatcccacgaacttccaatcgaaaatggaatcctcacgcagacggccgatggaaacacccataccaccctcgtaatccacatccttgagcacctgcggacggtcatcctcggtcaggtactggatgaaatgcttcggagcgtgcggcaggccaagctcggcggccttgctggtgtagttgaccagacggtcgatcagctcgtccttggtcgggttcttaccgaagttgatgaacacggtggcggtgtggccgttgagcacgggcacgcggatgcactgcgaggtgatgcgcagcggaccgtcgaacggcacaatctcgcccttggcctcgtccacatggccgaagaccttcagcggctccttctcggacttcgcttcctcgccggagatgaacggaatgatgttgcccaccatttccggccaatccttgaacgtcttgcccgcgccggaaatggcctggtacgtgctcacgatgacctcgtgcggctcgaattccttccacgcggccaaagccggagtataggcctggatggagcagttcggcttgacggcaatgaaaccgtgcgtggtgcccaggcgcttcttctgatgttcgatgacctcatagtgctccggattgatctccggcaccaccatcggcacgtccggagtccagcggtgggcgctgttgttggacacgaccggggtctcggtcttcgcgtattcctcttcgatggcgcggatctcgtccttcggcatgttcaccgcggagaacacgaagtcgacgtccttgaccacgtcctcgacgtcggccacgttcttgacgaccatgtgcttgacgaactccggcatcggggtttccatcttccagcggctgccgatggcctcctcgtaggtcttgccggcgctgtgcgcggacgcggcaagggtgaccagttcgaaccacggatggttttcgagcagcgtcacgaagcgctgtccgaccatgcccgtagctccgagaatgccaaccttaatcttttcggacataacaacctttcgcttatgctggaacggttttccaagttttgcaagtttgattttgcttacgcttgaggtcgaccagccggccccaaacgacgtcgtgggcggccacacgcgttgttcaatcttacgaaaacccgccgtcatgtccgccgagctatccgtatgctggtcggtaaacgcgctcgcgtacactggtagacatgtcgaaggcatcagaagaagcgcagaagcagctggatcgtatcgtggcgttggggtatccggatgtggccgatatgtcggcagccgcgttccgctcgcttgcgcgcccgcttatccgtgcgttggaggattgcggcgatgaagctggattgggcacgcagatccttctggtacctacgcgcgagctggtgtctcctgaatcgctgatcgcccgtacgtccatcaaccgtatggccggcttcaccaccatgccgccgcgcgacatcgccagcttcctgccgcaggacggtttcgaaccgccggaaggcccgttctatctggtgatcgaaccgcacaccggcacctgctatatcaaccgcgagccggacgtggcacgcaagctgatcgattccgacgagcgattgccgttgactttggaagaggggcttgcgatcgccacgcagcatccggaatggttgctggagaagaacggtttcaacctgctgggctcgcgttccgctgacggccgcgtaccgagtatctggatgagccagaatgctccgcgattgggcgcggtgtggccgaattcccgtcatacgtggctgggcaacgcctactgcatggcccgtcgaggcgtgagcctgttccgctagtctttcggcttaccgcgccggctccctataatcgatttcagagaagaaactgaagcaggggagaagccatgttctgtacgcaatgcggttcgaagaacgctccggagtcgaagttctgcacgaactgcggcaatccgttggtctccgttccggtgcagcctgatgccggacaagcacggatttcggatgatttttccgtcgattccacggtggcggaaacccctgcatcgcagctcgcaccgcagtctgcggagcaacccgaggaacagtctgcggcacagcacgaggaacgccctgcagaacagctcgcttcgcagccggcagacgcgattccgccggtcccgttgccgggcggcggcacgctgcccgtagcgcagcccgcgacttcggctgcatcgcaatccgttccgtcggcgccggaaactcttgagccggaaagcgacgggactgcgcgtgccgcgtccccgaatcgcaagctcatcatcggcatagcggtggccgcggtgctgctggtcgccgctgtggtggccggcatcgtgacgtacaacatggagttgtggggtggcaagtcgttgccggacgtggcggtggcgtctcccaaggactcgtcgaagactccggatgcgaaggtcgtggtcaggcagcttgaaggcaagggtctcaaagtcaagcgcgtcaaggaattctccggcgtgaaaagcggcaagttccttggctatcagggaattcagtccggtggccgcgtaagggcgggcagtgtggtgacggtgcgcgaatcggccggccctggcgtgccggaaggtacggtcggcaagaaagctgaaagcgtggtgacaacgttctcgcagatgggcgtgccggtgcattacaagcaggtgatcgtgtcggacaccagcaaaaccaccgagggaagcgtggtcagcacgtaccccgcgcaaggccaaggcgtgaaggatgataagaaaggcatctacatcggcgtggccacgaaaagcgacggcggcctgccgtcggacatcgtcggccaggaaatttccgacgtgaaatcaagccttgaatccaaaggctacgacgtgaaagtggagaaacgtctctcatcgaaacagtacatcggcaaggtctccggctccgaacctgggccgggcagccagctgaacgaaggccagaccatcaccctgtatcagggtgtggatgccaagggtgccaagcagacgttcattgaccacagcggaaccggtggagatgggttgctgatgggcatgagtgacgttgcttctggccagtggtgcaataaggccggcgactgcatcacgctaggacaggatgacagttattccagcggagacatcgttttcctgaaagtgaaagatggtgctgcgaacacgaagtacagcatgaccggtgagtctttgatttcctgcgatgcggtgcaacagccgtattgcagcagcaagaaagccgactatctgttgactggaaactctggagcatttgaattgttcccgcacaaagcgttcgaaacgtattggtgtggcgattccgccttgggtggggaaggcgatatgcggagttgtgttgccggaaaggtccatgacattgattccgactcttcggatgcgtccgattatgagccggacggcagcggtaaattccatatgatggatttgttcgcggtgttcccagtcggctctgatgtggaatcagtagagaaaactggctattttgacgcgtctgcgctcgcggctgcccaaaagcaaaaacctgtcgatacggaccgtccgttcttgatgtatcgtgacgtgaaccagtacaagaacggcgagaaggaatcaacctatacaagggactggttcgatccattcatgccttacaacggctacaacggctccaaggatgacaccgtcaaaatgaagcccgcccccagcggcgaaaccgcctactatctggtggaggacgtccagcccgactgggattccctcgaagacgccaacatcaagggcgtgtccgccaagagtcagaaatctaacggcaaaaatgcaagcaagaacgcagacaccaagaaatctgattcccaatcggatgccgccactcggtctttgatgaagtccatcgccggaaagtacggtttcgcttccggttccggcggttggggcaccactatgacggtggcgtccgatggcacgttcagcggaacatatcatgattccgacatgggcattacgggagatgactatccgaacggatcggtcaccatttcgaatttcaaaggccgtttcaaggatgccaagaagaacgtggacggcagctatacgatgcaatgcgacaaatcggcgctgaaaatcgatggcaatataggagacacgtatatcaaaaacggtagtaaatatacggttgccgacccctacggcattgccccctgcggtgcattcaccgtatatccggcgggatacgacagttcgcagctcagcgaagcgatcgtcggctggagccgtgcgtggtatgacagcatgcccgcaaagctggaaacgccgattatcgtgaatgccgaggacacgaatctcggtagcgaatcacagcaagacgccttcttccaatcgaaatatcttgagtgatattcgataaggtcgcgttgtcggcggtgctgccgccgagtcgctgtcgatcattgcgattgccacgagcatcgcattactgcgatttgcgcaacagcccccgaactgcgtatccgatcgcgccgcacgccaccgcgcccgcacccagcagcgtggcgctgacctgcggcctgcgcagctcgttgcgcacgccgatcaggtccgtcacgcaatggtcctcgaagaacacgcgtaattcgttgctggaataacggccgaccagatcgccccacgtcatcatgcgcgtcacgtacgccatcggattgtcttcgcggaattcaaacagccggatgccacggaaccgcgatttcgggccgtagcattcaaaaccacaggtcggcgcgtaccccaaatcgatgtcgtgcacatgcccgacgaacgaattcttgtggtcatgcccgcagaacaacgcgaaatagccgcccgcctcacgcaacgcgtccacttcgcccacgttcacgtcggcgcagccaatcgcctcgcccagccgcgaaccgggtcggcacacatcgcggtcgagcacatagcaatgtcctgcgaattcgcgcgcgccctccacggcgttcggcgtgtaggcgggcacttcgcgcaggcaatcgtagaattcctgcggcggaatgtgctggaaggcgattgccggcaccgcctgcccgtcgccattgcgcctgcccaactcgcgttgcacgtctttcagccattcgacggcttccggcgagggggtgccgtagccgtcggagtcggccaaatcccagccgcgcgaattcgccgcgtatttcgcgtattcggtgaccgactgccgtccgttgccgtcgcccgcgtctgccgtgtcggcgtaatcgcccgaattgaccatcatcacgctcattgtgatgcgccccgaaccgtcggacgcttcgatcggcaacgcgaacgtgcccggttcgagcgccaacggagacgagccggcgacgggattcatgcaaccggcaaactcgcggtaaagatcgtcctgttcgtcggcgaggatgccgcattggaaatcatggttgccgtacgtcgctgcgaaggggatatgcgattccaacgccggccccaaaaacgcggcgaatgtgtcgcgcactttctgccgtgtctcgtcgagcagcgacgccgcggtgacgcgattgatggcttccgcccacgattccagcttgctggcagaaccgttgcgacctgcgcttttcaccagtttcggcgaatcggtgccgatgccgtcgatcatccaccgttcgtcggagggctgcgatttggtcagtgttttggcgatcggatgacgtttgatgccacggattttcgcttcgatttcggtgaccgcgcgcacgtgcgtaccgggctgttcgccacggcgacgtagaaacgtatcgatatatgccggatcgtagccgcggatctgatcgccggtgagcacgatgaggtcgggatgtgccttcctgatagcggcttcgatcagccgaatcgtgtcttcgcgcacgtccggaccatcctgaatatcagccatttgcagcacccggaacgtaccgtcgctgttgaatcgcaagctcatgatgcccactgtactgcggcaaatctggatatggggtgaaataagggcgcgaaaatcgcaaaccatgccgtcatatcgcggaataccggcaaaatatgggattggttgtcgctagtatgggcggcagtgcaggtaggtaacatgcacgtaacaatgtggattggcagaaggccgatccgactttacagataaggaggagtgatgggtcaggatcaatcgtcagtgtttgatctcgcggcagtcgccgcggcgtccaacggagggaacaacgacccgctgctgcctccggcgcgttacattggagctccgcaaaagcccagcaagatgccgtacaacaagtacgtcgcatacgataagcaggtgccgtttgatttcccggagcgtacgtggccgggcaagcgactgcagcgtgcgccgcgttggtgctccgtcgatctgcgtgacggtaaccaggctctcgtcaacccgatggattccgagcgcaagctgcgtttctggaatctgctcgtgtcgatgggcttcaaggagatcgaggtcggcttcccgtcggcttccgaaaccgattacgacttcatccgcatgctgatcgagcgcgagctcattccggatgacgtcaccatcgtcgtgctcacccaggcccgtgagcacctgatccgcaagacctacgagtgcctgaagggcgccaagcgcgccgtcgtgcacttctacaattccgtgtccgtgctgcagcgcgaggtcgtgttccgcaaggacaaggccggcatcaagaagctcgccaccgacgcggccaccctgtgcaaggagctcgagggcgaagccaagggcatcgacctgtactacgagtattctccggaatccttcaccggcaccgagccggagtacgcagtcgaggtgtgcaacgcggtgatcgacgtcatcaagccgacgccggaacatccgatgatcatcaacctgccggcaaccgtggaaatgaccacgccgaacgtcttcgccgacgaggtcgagtatgtgtccaaccacctcgtgccgcgtgacgccgtggtgctctccctgcatccgcacaacgacgagggcatgggcgttgccgccaccgagctggccgtgctggccggcgccgaccgcgtggaaggctgcctgctgggcaacggcgagcgtaccggcaacgtcgacctggtcacccttggtctgaacttcctgacccagggcatcgatccgcagatcgactactccaacgttccggaaatccgcaagaccgtcgaatactgcaaccagatcaagatctccgaacgccatccgtatgcgggcaacttcgtgttcaccgcgttctccggctcccaccaggacgccatcaagaagggtctcgaggcccgtcaggtggccgccgaccgtgctggcgccgatctggacagcttcgtgtggctcgtgccgtacctgccgatcgacccgaaggacatcggccgttcctacgaggccatcatccgcgtgaactcccagtccggcaagggcggcatggcctacctgctcaagaccaaccacaaccttgatctgccgaagcgtctgcaggtcgagttcgagaaggtcgtgcagaactacgccgacgagaccaagaaggaagtcaaggacgaggacatctggcgtctgttcaaggacgagtacctgccggtcgaggaatccggcgccaccgcggctggtgtcgtggtcggcgacagcaaggacgagaccctcgagcagtggggccgtctgaaactgctgaaggtgtccgtctcctccggcgaggatggttccgacaccgtgctcaaggccaggattctcgaccgtggcgtgaacgttggtgtcgatgagccggtggagcgtgaggtttccggcatcggcaacggcccgatcgcggccttcctcaacgccgtgagcaactttggcatcgaggcttcggtgatggattacgtggagcacaccatgtccgtcggcaccgatgccatggccgcttcctatgtggaatgccagatcggcgaggaggacaacacgagcatcgtgtggggcgtcggcatcgatacctccatcgtcaccagctcgctgaaggccatcatctcggccatcaaccgttccgagcgctgattgcgcggcgctgagcaaacgtgccggatatgattcgaggggcttcctgggtaaccgggaagcccctcgtcgttgtcgtgtgccatgcgatgcgcccgctcacaagtgcgacgagcgcgttccgtgacgcttcctttccgcggatgaagggtgtcgcaatgacgccacaccaagttgtacaacgatgtaaaacacggtatagtacatcgttgtaaaacctgtatctgcttactgaaggatcttccatgtcggccaattattccctgctgtgctatacacgcgaagccaccggacgcgaagaggcgaacaacgaggacatcgcctacagcatgcatttggcgctacgttccggcgatgacgccgagtggcagccgcttaacgaaaactatggcatcttcttcgcggccggtgtgccgatcgccgctgcgaccgcggagtcccgccgtgcgtgcacggccgcggcgcgcttcgccgcagacccgttcgacgcgcctcgccccgccaccgacgccgtcgcccatggcgtggtcatgcccggtatggatatcacgctgaaatcgctgaagaatccgttcctgttccgtcttgcggacggacgattcgccatcgccgcgacccgtaccgcccgcggcggtgagccggatggttccgaacggtcggcattcctgctcgccatcagcgatgatctgacggcgttcgaccagcgggggctggtgctgttgcgcaccaccggtggggtcaatcgcccgtccgtctctttcgacgccgcggacgcgtgctacgtcgtctcctggaccggtgacgatggcaaggcacgcaccgcgcggacggccgatatcgtagccgccgccggttcgggcaggccgcttgatgtcgtggaatcggcgtcgtcgcagccgttgcgtcagaccggggattgcggcattccgaacgccgtcgtcggcaacagcatcgccatcagtgagccggaggccgagcgcctgatcgagcgcttcggccgcatccgcaataccggaacgtccgtgcccgcccagcgaatcgatgcgggcctgcatggtgaggatgcccggaatgcggttctggccttggccgcaacccgtgcggaactgtcatacagcgacggttcgcaggccacgcgcgcggtggattggaacatggcccagcttgaggccatcggccaggaggcctccgagggaacgttcaaggccggccagacccgtaccgtcgaaggtgtgatccgccagagcgtctatccggtgccgttcgcggtggagcgcgccgatccatcggtgttcgcgtgggatttcaatggcaagccgatgttcatgttcatcgccaccgatgacaccgacggcaattgcgtggatccgaacgacggtagaacccatatgccgctgcgcatcgccgactccatcgaagcgctttccgacgccgcgggtggacgggccaaggagatcgatctgctcgcatgcggcgatctcaatagcgaagatcgtccgatgaccggctgcttctgggcgccggaactgcatgtgatcggcggcaagctgtcggtcctgttcatgccctgcttcgatgggccgcgcgtcaatcccgacggcacccccaacgatcgtgccggcaaaccggacatgtggaccggcagctgccacatcatgcagctcaagcagcattccgacggcacggattttgatccgcgcgagccggagaactggacggtgcccgagcctatcctcgacccggatggcgagacgctcaatccgatccagcgcatttcgcttgacatgaccgtgttgtgcgattcaggccgctggtactacgcatggcagcaggtcggcagcatctggatcgccagcttcgacccaggtcgtccggcgaagctcaccagcaagccaaagcagattgtcgtgccggaattcgcatgggacaacatgatcgccgaagggccgaacgccatcatgcatgacggaacgattttcctgatctactcgggctcgctggtcggcatcgactacacgaccggcttggtcaccgccccggccggacagggggccgatctgaccgacgccagcgtatggacgaagctcgattacccgctgcagaagtccggcatgtacaacgggcggtggcagcttggcacgggacatggcatgtggtctcatgacgaggacggcaacctcatctacgtgttccacaatgccgagtacgagaacgggcgctatggcggccgtgacgcccaggtgcgccgcgtgcactggtccaaggagggtatgcccattttggatatgcagacggcggaagagcttgaccccgactatgctagggtgactatggaggtcggtcgcgagggcgactgggctcgctgaatgccagaaggggtagaggggtatatatgccgaagcgaactgggggaagcggcgagcatgtcgtgaccatgcgcgaggtggccaaagcggccggcgtatcgataaaaacggtttccaacgttgtcaacgattacgaattcgtctcgcaggccacgcgcgacaaggtcaacaaagccatcgcggaactgggatacacggtgaacgtgtcggcacgcaacctgcgccgagggcagaccggcatcatcggcctggccattcccgacctgcagatgccgtacttcgcgcaactgtcgtcgctcgtcatcgaggaggcgaagaaggtcggcctgcgcgtgatcgtggagccgacgcagtattcgcgtgacggtgagctggaggcgttgcacggcgcccagcagacgatgatcgacggcctgatttacagccctttggagcttgggcaggatgatgtcgatcagctgaaggtcgattatcctctcgtgctggtcggtgaacgcatctttaccgaccaggtggaccatatcgccacggagaacgtcgaaggtgcgaagcgggccacgcagtatctgctgacgaccggctgccggcatgtggcggtggttggcgtgcatcgtggcgagaaggtcggttccgccgcgctgcgctatcaggggtatcttgaggctctggaggaggccggcgtcgaattcgacgatcggctggtcgtcgaatcgggcatgtggcatcgtagcgacggtgtgagggccatgaacacgttgctggattccggcgtcgaggtcgatggcgtcgtcgcattgaacgacatgctggcttccggcgtgatgcatgccattcagatgcgtggcctgcgcattcccgatgatatttccgtggtcggcttcgataattccgacgattcgcagtacctgtcgcctgctttgacgtcgatcgcgccgggacttgaggcggtcgcccgtctgtcggtgaaggtgctcaaggaacgcatcgacggccgtgacccgaatgtcgacaagccgggggagaagatcttccgcaaggtctcgtcgtcgctggtcgtgcgccaatccaccaaactccccgccgattccctcgttctctaagcgttcgtctgcctgcggcaaatttcctggcgtaccgggatactttccgtccggccctcgttgccgtacccatcggttggctcttcccccaaggtgccgccgccgggcatgggcgctcgaccgtaagcttggccgaacggccttgagtgtgtcgagcacccatgcccggcggcggcaccgacattggcatgaatggcgcaaacgatggatgcccatgcccggcggcggcaccgcatccaagcatcttctgacaatgacgcgcccaagttgttacaacgatgtaagaatgatatattcaacgttgtaaatactggaacaacggattgagaaggactaaacatggttgtttacaacaatccgatcgtgcttcagcgcgcagacccctgggtgctcaaggttgacggcgagtattatttcaccgcctccgatccggaatacaactgcatcgccatccggcacgcgtcgagcatcaacgatctgcagaaggctccggagacggtggtgtggcgcaagcacgaatccggcccggcaagcatctacatctgggcccccgaactacaccgcatcaatggcgcatggtatatctacttcgcaggcgccgcaacggatttcgaagcatccggcctgccgacgcaccgcatgttcgtgctggagaacaccgacgacgatccaacttccgacaactgggtggagaagggccagatcatcaccccgatcgactccttcgcacttgacgccaccaccgaggtgatcgatggcgtgcagtacttggtatgggcgcagaaggatcccgccatcgaaggcaactccaatctgtatatcgccaagatggccaatccgtggacgctgggcagcgagcccgtcatgctgaccaagccggaatacgactgggaatgcatcgacttcctggtcaacgaaggaccggccttcctgttccatgagaacaagatctacatcacgtattccgcctccggcaccggagttccgtacgccgtggggctgttgaccgccgagcgcggcagcgatctgctggacaaggcctcctggactaagagcccggtgccggtgtttaagacctgcaccgagaacggtcagtatggtccgggccacaattcattcaccaagtccgaggacggcaccgaggacctgatgatttaccactgccgcaactacacggaaattaagggcgatccgctgttcgacccgaatcgccacgcgcgcgtcggtgtggtcaagtggaccgccgacggtccggatttcggcgtgccggaacctgataatctgtggacccccactaccacggacgtgttgcccgctgatggtggcccgcttgcgggaactccggccgtaggccactgaggggcgtggccggaggggtcaccccgtctataacctcatccataaagctggctgttgtcgtcggcgtgttaccgtttgtacaacgatgaaaatagctgtataatcaaaattacaacgttgcaaatgagcagggaggctcaatcgaaaaggattcttcccattcggattgcaacgaggagcggtccagcgatggtccgttgaggaaaaggaaggaaacaatgtctacatccaggcatcttaccgggttgcggcgctttgccaaggctgccgtagccgtgtgtgcgtcacttggacttgtgcttgccgccggaggctgtggtgcctcttcgggtgaaagcaagaccatttacttctggaacaatctggtgggcgatgacggtcctgcaatgcagcgcatcgtcaaggaatacaacgcccagagcgattacaaggtcgttttccagccgatgaacggcggcgatctgaccacgaagatctattccgtgatgcagaccggcaagaacatccccgacatcatcatcggcgaccagttccagaccgccgttctgcagtcccaaggtctgctcgacaccatggacgattggcagaaggtcgccccggacctcaaggagagcagcttcctgcccgccacttggaagggcgtcaccgtcaatggcaaggcctacggcattccgctgtatctgtaccagatggccatctactacaacaaggacctggtcaagaagtacaacctgcagtacatcctcgacgacggattcgtcaccatcgacgagatcaaggacctcaagggcaagctgcccaagggcacctacgcgctgacttacggcaatctgccgtgggccttcatgtccctgctgtacggcgcgggcggcacgcttgagaacgatatggacgacctgaccaaggacgtgtggcgcaagcccatggagaagctcaaggaagcgtacgacgccggtgtgatcgccccgatggacgtcgacggcgagcaggcgttcggttccggcaaggccgtgttcgcgcagcttggcacgtgggcgcagggcaatatgtccaacaccttgggcgccgacaagatcgcggaagccaacaccctgcagtacagcgccgacaatccggtgaacttcttctaccagtgcaactggatgcagttgaaggatccgcaccgctccgcggcgaaatccgcagccgccgccgacttcgtcaagtacgtgtacgagcactggatggattggtctgaggtcggttccatctcgccggcataccgcgatctgaacaacccggagtaccagaagctgatccaggcgtccttcaccaacagcaagaaggaacgcgactacatcaagacctccaactacctctacggaggctatgcgaccgctggttggggcacatacaacgacatcgtctacggcaatgttggtcttgaagaaggtctgaagaccctcgacctcatggcccagggccaaatcgagattcaggaggaatcgtgatgagcaagacatctacgatcggatccgcaaaatcatccatgaagcgcaagaactccatctggcacgcgctgccgtacatcgctccgcacttcatcatcttcgccgtcttcggcatcatcccgattatcttcggcattggactggcgttcacccgctggaacatggtcggtgcgccgaagttcgtcggcctgcagaacttcgcgaagatcttcgaccccagcacctatttctactcgatcttctggcgtgatctcggccacactctgctcttcgtgctggtcagcgtgccgctgaccatcatcgtgccgctgctgctcgccgtggcgctcagcaagaagggactcaagggcgctggtctgttccaggcgatcttctacatcccaggtttgatctccatcgccgccggtgcactggtctggcgtatggtcttcaactcccagttcggtctgctgaacaccaccttccacaccgacatcaactggctcggcaagaacccgtacgcatggatcaccatcttcgtgctcgtgctgtgggccggtatcggcggcaacctcgtcatctaccgttccgcgctctccggcgtggacgagagcctctacgaagccgcgaaggtcgacggagccggtccggtcaggatcttcttctccatcaccctgccggaaatcaagctgccgttgttctacaccaccatcatgaccaccacgggcgccttcaacgtgtggggccagccggtcatgctgaccaacggcggaccgaactaccagacccaggtgctgctgatggatatcaggaacctcgcgttccccgccggccctgcggccgccggcatggcttccgcaatggcattgctgctgggcatcatcctgatggccatcgccgcgatccagctgatcttcatgaataaggaggactgaagatgtccgctgcaaccacagtcaatgtcgcaagcgcggcaattcctgaaaacaaaaccaaaaaggtctccccgtcgctgatcgccgtctatgtggtgctcgtcgtgctggcagtcgtctggctgcttccggtgatctacaccgtgacgacttcgttcaagtcggtggccgaattcacctccaacgcgttcaacttcctgcccgcgaagtgggtgcttgacaactacatgacgctgatcgaggcatccgccagctacccggtcctgaactggctgggcaactcgctgattatctcgaccgtgttcgcagtgctgtccgtgtgcatcgtcgcgctcgcaggcttcggctattcccgtctgaacttcaagtaccgcgatacgctgttcttcgtcctgctgctcatctcgatgttccctgccgtggtcaacatgatcccgcagtaccgcatcatcgcctccctcggctgggtcaacacctactgggcctgcatcatccctggcctgggcaacgtggcgaacatcttcctggtgcgcaacttcatgaagggcatcccgaaggaactggacgaggcggccgaaatcgacggcgccactgatttccagatcttcacccgcatcatgctgccggccatccgcccgattctgatcgtcatcttcctgttcagcttcaccggcgcttggaacgacttcctgtggccgaccttggtgttcaacgacatcaacaagatgccggtcaccgctggtctgcagctgctgagcaaccagatgggccagtacaaccagatgggctccctgatggcggccacctgcatggccatcatcccgaccctgctgctgttcctgttcgcgcagaagtacttcctgcagtccctgaacatcacctccggcctcaagggctgataccggccgagtgagataatgcacaggtccgtccccaaacggacgggcctgtgattttatctttcccgagctgcgcatcgcacatcggatgaggccacaccacggaaaggaccgatatgaatccgcaaggcaacaccatgcagccgccggcaccattggctcgcaaggcggaacgagtgctgatgaccatcgccgccgcctacaacgtgatcatggcgtccatcacactgttcatgttcaccagctggttcaaaggccaagcctacgatctgctggaacataacggtttgctgaaaacggactattccgcggtggacaacgcctcgacggtggtgggcatctacgcgctgctggtgctgattatcggcatcgtcagcttcatcatgtccatgcggtgtctcgctcccggcaccaccagccggtgggtgatcatctggctggcaatcgtggtggtcttctccctgggcacgatggacctcatcggccttgcactgtattccatcaccttggtcatctatctggcccgcaacaaggccatcgcggcgcagcaggatgcgatccgcacatgggcccgcacgcatcagggctaatcctccttcccgaagaaagctgtcgctctcgtggcggcggctttcttcgtatccgcgcatgttgacgcggtacgttatcgaacacgcaattcacttatccaattcattcattcacaaccacaaggtgggaccatgaccgacacaaccgacgactacggttacctgctcgtccacttcatcgaggatccggacggctacgccgagaagatttacatggatatatccgatggagacaatccgcaccgttgggtgccgctcaacgatggaaagcctgtgctggcttcgcatctcggtaccacaggcgtgcgcgatccgcatatcatccgcaatcccgacaccggcacgtggtatatcatcgccaccgatctgcgtgtgttcggaggcgacggcggcggctggtacgagtggagccaccacgccagcacgaatctcatcatctgggaatccgacgatctgctccattggagcgagccgcgcatgctcgacgtgtcccgcaagccggacggctcccatctggagcttggtatggcctgggcatgtgaatgcctctgggtgccggactattatccgcaaggccatcacggtgggcgcggcgcattcgtcatgtattggtccagcaccgtgttcaatgatgcggacaaggctcacgacgacaagaacgtctactgcaccgtgctgtggggcgccaccaccgatttcacgcaggacacgttcgaatatggtggcgtgttcatcgacaaccacggtgacgccatcgacaccacgatgatccaacgtccgctgcctgatggtggtgtgcgcacgtaccgcatcaccaaagacaatgcgcatggcaccggcatctggatggaccgcaccgacgcgaagcgctggtgggagccgggaacgacctggaccaaggtgcaggaccggattggcgcaggctacgtgccggacggcaaccccggcggcgtggaaggtcctgcggtgttcgccaaccaccacaacaacggtggaccggacgacgaatggtacttgttcgtggacgtgattccgtcgatcggataccgtccgatggtcagccgcgatctcgatcagggctggatgccgttgcaggcggacgattacttcctcaccgcgcatacgaaacacggtggcgtcgcctcgctgacgcgcgccgaatacgaccgtctcgcccagcatgtgcatgcattctgacaaacgacgctgatgattgcgccgcgcgagcgcgcggcaaagccaaggggcttcccggaatgaaccgggaagcccctttcgcgtgctcgctgactgcggtggccgtctcttcgattagcggctatggctgctgcgtatcgccgtcggtgctaccgccagagccgtcgttgccggtttcgcttccggtattgcctccgttggtatcgctgccgccaggagagggggtattgccagcattgccgccatcgccactgccttgaccggagttctgcgattcctcggtctgatccggcgtggtctgttgggtgttctcctcggtgtgcggagtcacggtggtctgttgctttctagtccaggtcttctgcgcgccggtgccccacgtaccgtccggtccgccgaccttgccgttatcggtggcgtcggggaacgtttcgttcggcgtatcggccagtgcctgcttcatgtattcggtgaagagatgcacggggtaatcgctgccgccggtccagctgccgaatgcgggaatctcctgcgggttgccgttgtcgtccggataccacatcgccacagaagtcagcatggacggcgtgtagccgatgaagctcgctgcgttggaatcgtttgcggtgcctgacttgccggcaatggtgtgcccagtggcacgcgcctcggtggcggtgcctcgctggaccacgccggtaagcgccttcgtcacgagattcgcgttgttcgcttcgaacgtctgctccgccgaggtcggcgcgttgtacaggtcggtgccgttcgccgtctgcacttgggcaacgatatgcagcgtcggcttgttgccttggttggccagtgtggcgtatccctgcgtcatgtccttgagggtcaggccgttgttgccgagcacggtgaacgggttggaaccatccaaagacgaatcgtcaacgccggcctgccgtgcggtttcggcgattttctgcgcgccgagcttggtttgcagatccatgtacacggtgttcgaggattgttccgtcgccgtgtacaggttcacgtatcccagattctcgccgccgtagttgctcaccgtttcggtgatgcccgggaacgtccggtacgagttgccgttgaagtacgtgttgaggctgacgccttcgttgacggcggccagcaatgcgaacggcttcatggtggagccgacttcgtacgttgcctgggtgacgttgttgagctgcttggtcaggtagtcgtctcctgcgtacagcgagatgatggaaccgtccttggggttcaccgacagcgcgccgaactgcatgccgtcgggcacgatgccttgcatgccgttttgggagggactgatggtggagaacatcaggtcctgcttcgatttgtcaatggtggtgacgattttgtagccgccggtttccaggtcctgcttgctgaacgccttggtgttgacgagttcgttctgcaccatcgtcagcaggtatccgttcggtccggacatctggttgttctgttggatttcgatggtttgcgggaatttcgcgtctttcttctcgtccggcgtgatgtagccgtcttcgtccatgatgttcagcacgcgcttgtaacgtttttcagcctgcttgggattcacgtcgggggtccatacgctcggcgcgggaatgatgccggcaagcatggccgcttcggagagcgtcaggtccttcgcgtccttgccgaagtacgctttggccgctgcctggatgccgtatgcgccacggccgagatagatggtgttcatgtagttgcacaacacctggctcttgtcctgtgcttgggcgattttgaccgccaggaacgcctcacgcagtttgcccacgtacgaggtggtttcgcccagataatagcgttccgcatactgctgggtaatggtggaaccgccctgcctgctaccggtggtcaggttgttgtagaacgcgcgtgcgatgccgatcggatcgatgcccttattggtatagaaggagcggtcttccgaagccacaatcgcgttgccgacgtagtcgggcaggtctgcgcagctgatgatttcgcggttctgttccgcatagctgccgatcggcgtggtgccgtcgttgtagtacacggtcgtcttttcggccagcgcgaacttttccggctgtgggatttccgtggtggtgtacatgtaggcgaacaggccgatacctgccgcgatgagcgccgcgaagatgccgagcacccatttgagcacgagatgcttgtgttttctggtctttttgggtgcgcgatgcgaagtgtgcttcggcctctggggcggcttgctcagcacttctccatggaccccgtaggtggtgcccacccgtggcgtcgtggacgttgcgctgccgctgcgggcgctttttgagcgtgagctgacacttcgtgttcgtgaaaccatggtttccaccgtagccgaacgacctgaaaaacaagggtgtagatagtgctgtccgactggaaaaacatgtttttgcgcagcttttttacaaatcgacaatctgttgacgactgccgtaatatggccgtttttcagtgatttttcagtttgcaatgcggtttgtgggtatgcttggggattggtatacctgcgaaacgcataacagaggagtcgttttcagatgagcattcgagtggctatcgccggcgtgggcaattgcgcctcgtcgctggtgcagggcgttgagtattacaaggacaccaaggacgaggataagattcccggcctgatgcacaacaatttcggtggctaccgcgtgcgtgacatcgaattcgtcaccgcgttcgacgtcgatgcgctgaaggtgggcaaggacctgtccgaggcgatcggagcctcccagaacaacaccatcaagttcgcggacgtgccgaatctgggtgtggaggtgctgcgtggcccgaccaacgacggtttgggcgagtactaccgtcagatgattacggagtcggacgccgagccggtggatgtggcgcaggtgctgcgtgacaagaaggtcgacgtgctggtttcctacctgccggttggttccgagaaggcggacaaggcttacgctcaggccgctatggacgctggctgtgcgttcgtgaactgcctgccggtgttcatcgcctccgatccggagtgggcgcagaagttccgtgacgctggtgtgccgatcgtcggcgacgatatcaagtcgcaggtcggcgccaccatcacgcaccgcgtgctggcccgtctgttcgaggatcgcggcgtgcgtctggatcgtacgtaccagcttaacgtcggcggcaacatggacttcatgaacatgctgcagcgttcccgcctggaatccaagaagatctccaagacccgcgccgtcacttccgtggtgccgcacgagatggatccgcacaacgtgcatatcggcccgtccgattacgtggcttggcttgacgaccgcaagttcgccttcgtgcgtcttgagggcaccacgttcggcgatgtgccgctgaacctcgaatacaagcttgaggtgtgggattccccgaattccgccggtattgtgatcgacgctgtgcgtgcggccaagattgcgctcgaccgccacctggccggtccggtgctggctccgagctcctacttcatgaagtctccggccgtgcagcacgaggatggcgaggcccgccgcttggtggaggaattcatcaagggtgaggtcgaaggcaccgaagagcagcttgacgccgatgtggcggccgcgaaggccgccggcaaggatgtgtggcgcgcatagcgtgcgttgctgacggcagacccgcgatggcaatggcaaccatctcgtaggtctcgacccactcgcctgattcgtaggcagaatcagcatataatgaaaatccctatggcctggggtaatgccatagggatttttgttgtcccggaacgctgcggcggtggtggccaatggtcgtacaccgcagcagcacgaacggggaatcatatgttgcgcaatgtatatcgcgtcactttttgaggagtggttcgacctgctgctcgtacgcggtcaacgcggtgtcgatcacgttgtgcatgtcgtaatacttgtacgtgcccaaacggccgccgaacacggtcctcggctcggccttcgcgagctcctcgtacctcgcgtacaacgccttgtcggcctccgtgttgatcggataatacggctcgtcgccacgctcggcgaaacggctgtactcctcccacaccaccgtcctgtccgggttctgcgaagccctgcgctccgggttgaagttcttgaactcgatcgcgcgcgtgtacggcacgtccgggtcggagaagttcatcaccgggcatccgaaatggtcgccctcgtcgtaacgcacctccctgaagtccaccgtgcgccacttcagctcgccgagcgagtagtcgaagtagcggtccaccggacccgtgtacaccaccggcacgcccgccgcggccagcgccttcctgttgtacggctgggactcgtcgaagaagtcggtcctgagggtcacgtggatgcgcggatcgtcgatcatgcgctccatccaggcggtgtacccgtccgtgggcaggccctcccacgtgtccctgaaataccggttgtcgtagttgaagcgcaccggcaggcggttgatgatgcccgcgggcaggtccttcggatcggtctgccactgcttgcccgtgtagttcttgatgaacgcctcgtacagcgggcggccgatcagcgaaatgcccttgtcgttgaggttcttcgggtccgtgcccgccaattcgccggcctggctctcgaccagggccttcgcctcggccggcgtgtagtgcgcgtggaagaactggttgatggtcccgaggttgatcggcaggggatacacctcgccgtcgtgcgtggcgtacacgcggtgcacgtagtccgtgaagcttgtgaaacggttcacatagtcccagaccctcttgttggacgtgtggaacaggtgcgcgccgtacttgtggatctccgcgccggtctcctcgtccatgtagctgtacgcgttgccgccgatatggtcgcgcacgtcgatgatctcgaccctcacgcccaggtgctcgacggcctgctgggccacggtcaggccgaacaggcccgcgcctacgaccaccagatcgggatactccaccgcatcagtcataacaaaacaaccttccaaacgttatcgatgcttatcgcagccacgcaaacgcacaggggcggcgtgcgattccttctcaagtgtacccgtgcgtctagtcggtgcggcgaggtccgggcatggtgtaatatggcaagagcctccgcgtggcggtatgtcacccaactcccccagggcaggaatgcagcaagggtaagtggcctcttccgggtgcgtggaggtttttctatatcttctccgattcgttccccacagtaggggcgatgccgtattctcggtgactatgaccaacgaattcaagccacttgtccgagatccacagcagcctgtgaacatgcttcagcagcccacggcagcaacgcctgcggaaccgttggaatcgttgtcgttccctgatatgcgcgaagtcgaggcggtgctttctccgcaggatgtcaacaaaggcttggctcaggcggatccgctgacccgccatccgcgcgtgtccagcatcgtgctgtgcgtggtgttcggtctgctgatgcttgccgcttccgccggcgtctggtggcttggcgtgcgtaccatggacggccaaagctatgaggatatcgtctggtcgaaattcgatgccgcgttgccgggttggctggcgccggtcgtgcacgtcttcgccatttccgcagtggtcatcaccgtcagcgtcatcatgggggcaatcgcgtttgccgtgctgatcgtgcgcaaacggtggctgtcgatcgcgcagctcgctgtattcggaggcctgtgtttcgccgcggccgaactgttgaagccgctgctgccacgcccgtatcttattaatttggaatcgaatcctaataattccgcgccttccgggcatgtcatccttgccgctgcggcaagcgtgatgctgctgtgcgccgtaccgcgcgtgctgcgtgcgctggtggcggtgattggttgggcgtatacggtgctggtcggattgtcggtgatcgcggcgcaatggcatcgtccgaccgacgtgattatggcgctgctgatcgtcggcggactggcgttgctggcgcttgccaccacgttcgccagcggcatggatgagccgggcacgcgcgtctcgtcggcaagcgtgcagatcgtcggcagtgtgatgctgacgattggcgtattgggcatcctgtacggcgcgtatatcatctggcagattcagccgggactcgccatgagcgccgaatggacgaatgccggcgcgtacgtttccacggcgctgctgacggccgccgtttccgcgctggtgcttggcataacgctcgccatgcgtcagctgaccgcctcgccgttgacgaaactgggtttggtgggagcgccgcccgcaccgccgaagcgctgaaaacagccggttccgggcatgctgccgtccatacgccacacgggcggtttgccatttctccgtattcagtgagtattattgcgttgcaaacactagtaataaggagtggctatggctaccggcagcaagctcgttattgtggagtctcctaccaaggcgaagaagattggcggatacttgggctccggatacacggtcatggcatcggtcggccatatccgcgaccttgcccagcccagccaggtgccggcggccgagaaagccaagtacggcaagttcggcgtggatatcgaagacggattcaagccgtattacatcgtggacggcaacaagaagaaaaccgttgccgacctgaaaagcgcgctgaagaaggcagacaccctctacctcgccactgatgaggatcgcgaaggtgaggcgatcgcatggcatcttgtgcagacgctgaagccgaaggtgcccgtcaagcgcatggtgttccacgagatcacgccggaagcgatcaaggcgtcgctgaacaacacgcgtgatgtggacgccgccatggtggacgcccaggaaacccgtcgtattctggaccgtctgtacggctatgagctgtccccggtgctgtggcgcaaggtcggtccgggcctgtccgcgggccgcgtgcagtccgtggccacccgtctgatcgtggaacgtgagcgtgagcgcatggcgttcgtgcgtgccccctattgggatgtcaccgccacgctggaagcgcccgacgccgacggcaacaatgttgcgttcgattctcgcatggtgtcgcttggcggccgtcgtttggccggttccaaggatttcggcgatgatggccagctgaccgccgccggcgtcaaagacaacgtcgtgcagctggacgaaacgcacgcgaatgcgatcgcgcgatcgctggaatatgcgacgttcaccgtcgcatcgatggaaaccaagccgtaccgtcgccgtccggtgccgccgttcaccacgtccacgctgcagcagacggccggcaatcgcctcggcatgagctcgcgtcagaccatgcgtgccgcgcaggggctgtacgaaaacggtttcatcacgtacatgcgtaccgattcggtgacgctgtcgcaggaggcgatcgcggccgcccgtgaagcggtgtcgcggcacttcggcgaaaagtacttgtccgatgcgcccaagcagtacgccacgaagacggcgggcgcgcaggaagcccacgaatgtatccgaccggcgggcgcgcatttccgcgatccggctgaaatcgccaccaaagtgccggccgaccagctcaagctgtacaccctgatctggcagcgcacgctggcctgccagatggccgatgcgaccggttccaccgccaccgtgcgtctgtccgcgccgaccgaatccgacggcgaggccatgttccaggcgtccggcaccgtcatcgaattccccggcttcatgaaggccaccggcgagggccgccgtagcgttgtcgacgcgaagaagagcgccgaggcggcgggcgtgaagattggcgataaggccgaaaagtctgcgaaggcttcgaagaagatcgatgacaacgtttccctgccgccgatgcagccgggcgacgagcttgccgccgtggacgttgccgcggacggccacgagacccagccgccggcgcgctacaccgaagcgtcgctcgtcaaaacgttggaacagaaggaaatcggccgtccgtccacgtatgcgagcatcatctccacaatcatcgaccgcgggtacgtgtacgagcgtggccgtgcgctgatcccgtcctggctggcgttctccgtcaccaaactgcttgaaacgaagttcccgaagtatgtggattacgagttcaccgccgatatggaaaccggcctcgaccagattgctggtggccatgagaccggcaaggcgtggctgacccgcttctacttcggttccggcgatggcgcggcccagtccgccgacgaggcgcatgagggcctgcagcagcaggtggcgcagcttggcgagattgatgcgcgtgagatcaacaccatcgatatcggcgatggcctgcacgtgcgcgtcggccgttatggcccgtatcttgaggacatgaagcatctggatgcggaaggcaatccgaagcgcgcctcgctgccggatacgctcgctccggatgagctgaccgtcgaggtcggccacgatctgattgaaaaccattccggtgggccgcgtgaactgggcaaggacccggcgtccggcggcaccgtcgaggtacgcaatggccggttcggcccgtacgtggcgctggtcatgccgagcgcggaagatgccggcgataccgctgccgagtccgccgcaggcaaggcgggcaagacgaagcgttccggcggtaagaaggcggcttccgaccgtccgaagatggcgtcgctgttcaagacgatgagtcccgaatcgctgacgttggaagacgcgctgaaactgctgagcctgccgcgcgaagtcggctcctacgatgaggcgaacgccgaaaccggcgaaatgcaaacggttacggtcatggccaacaatggccgttacggcccgtacctgaccaagaccggtgccgacggcaagtccgacacgcgttcgctggcttccgaagacgagattttcaccgtcgacttggagaaggccaaggaactgttcgcgcagccgaagtatggacgcggtcgtggacgtggcgcggccaagccgccgttgcgcgacttgggcaccgatccggaaacccagaagcacgtgaccatcaaggacggcttctacggcgcgtacatcaccgacggcgagacgaaccgtacgctgccgaagcagtatgcgcccgaatcgatcgaaccggccgaggcgttccgcctgctggcggagaagcgcgcgcaggggccgtcgaagcgtcgtggccgcaagacggctgcgaagggagccaagaagggcgctgccaaaggagcgaaatccgcgaagaaggtgaacgcgaccgaacaggcgcgtgccgaccgccgtgccaaggtgcgtgaactggccgacaagggttgggcgaatacgcgtatagcgaaggagatcggctccaccgcgtccaccgtgaaggctgacgtcgactggctgaccgccaacgaaggctacgcgcgtcctgaagtcgttcccgcacgctgacgttatgcggcgcgcgaaacgtcccacgatctgatgttccgcaagacaatcggcatcgtgcgacaccaagccgtgggccgaatggccgggcacggcaggggcgcacggtacagtgaaaggcatgcagggcacttttatctcgtttgaaggcgttgacggcgtgggcaagaccacgcaggtcgaacggttgcgcgcatatgttgaatctcagggccgcgaatgcgtggtcacgcgcgagccgggcggcaccgcattgggcgtggcgattcgcaaaatgctgttgcacggcgtggatacgggggatgaggacgattgtgccgacatcgccccgcgtacggaggcgctgttgttcgccgccgaccgcgcgcagcacgtcgcggaagtgattctgcccgctctgcaacgcggcgcggtggtcatcaccgaccggtatctcgattcctctttggcgtaccaggcgggcggccgcgagctgacggccgcggaaatccgaaacctgagcatgtgggccacgaacggtctgctgccggaacgcacgtatctgctggatatggatccggcgcaatcgcatgcgcggctgcagcatgccgaagaccgcatggaggcggccggcaacgacttccagcgtcgcacacgcgtcgcgttcctcgacttggctgaacgtgagccggaacggttccacgtcattgacgcaagccagtccatcgaagacgtgtgggcgcgtatcaaagccgatttcgacaccgtgagcaccgctaacgggggtatcgcatgagcgtgtggaactccatagtaggccaagcgcaggtggtcgaacagctgaaggccatcgccagcggcgacccgaaggccatcgcgcagtcgtggctgatttgcggccctcccggatcgggccgttccaacgttgcccgcgcgttcgccgccgcgctcgaaagccccgatcatggcctgaacgatgagccgaccaaaaccaccgagcaggtgcttgccggcacccaccccgacgtgagcgtgctggccaccaacaaagtgaccatcggcatcgacgaggtgcgtgacatcatcaccacatccgagcagatgcccggcaccgcgccgtggcgcatcatcatcatcgaagacgtcgaccgcatgatggaacgcaccaccaacgtgctgttgaaggaaatcgaagagccgagcccgcacaccatctggctgctgtgtgcgcccagcgcccaagacgtgctgccgaccatccgctcgcgcacgcgcatcgtcaacttggccgtaccgtccaatcaggcggtggcgaaattcttggaatcgcaaggtttcgagccgaatatcgcggcgcgtgcggcacgattgtcggaggggcacatcggcatcgcgagcctgtatgccaaggacgaacgcgtcatgacggaccgcgacgagctcatcgtcggcgtgctcggcttgcatcgcgcgtcggatgccgtgctattggccggcaacctcatcgacaacgcgaaggcgcaggccgaagcggaagtcaacgtcaaagcgtccgaagcggaagccgatttccgccgcatcaacgggctcggacccaaagaccgcatacccccgaaactgcgtggcgcatacaatgcgatcgccaaaaaagacgagctcaaacgacgcgccaccagactcacgcgtgacgtgctcgaccgtgcgctcaattcggccgccagcatctaccgtgacgtggcggtgctgcagaacaacgccgaggacgcggtgggactcatcaacctcgaaaaccgttccgccatcacggaattgtcggtacggctcgaccgtacgggggctgtgcgccggctggaggatatcgccaccgcgcgccgcaggctcaacggcaacggcaatccggttttggtgttcgaagcgctgttctgcgcgctgattccgtgattttcgtaatttccagtaattaccggcgattcgattcgcgattcaccggcggaacaccgaggaatcccgcacaataagctgcggggcgagcatgacacggggcgcgcgcacgctgccgcctggcgcagcagccgtctccgccgcgcctccggcaggaccggaagctagcaatcgcaagcattccgacacaatacgctcaaacggcgcacgcaccgacgtcagccgaggcatggtggtacgcgcgatggcggaatcatggtagccgaccaccagcacgtcctccggcacgcggattcctaacgcgtcgaacgccaccatcacgccgaacgcgatcgcatcgtcggcgcagaccacggcttccggctgtacgagcggcccgttgaacagccgcatggcgcaatcgaaaccgcgctgcacggtacgttcgccgaactggttccagttttcgctggtggcaagcccgtaagtgcgcatatgcgtgtggaatgtggcgaacagttccgccgattcgaaagacagctcgttgccggccatgtatgcggcggacgcgatgccctgctcggcaagatgtttgacgatcgcctccatcgcggcgttttcgtcgatgcctaccacggacacgcgcggcgcggtctgccgtccgcagatctgcacgatcggcagcgtgttcgcgtactggttcagcgttccggcaaggtcagcgccggctgcgggcatcacgatcagcccgtccacatggcggttggccagcgattcgatgcgttccgcctgcgcttcctgcgtggctccgatgcctagcagcagttgctgcgattcggtgtcgatggtcggctcgatctcgtcgagcagttgcgcggcgaacggttccgtggcgctcggaatgaccagaccgatggttttcgtcacgtcgctgcgcagcgcgctcgctgcgtagttgacggaatagccgagctgtttggcggcttcgcgcacgcggcgggcgatatcgtcgtccttgccgcgtttgccggacagcacgcgtgagacggtggcgatggacacgccggccgtcgccgcgacgttggtgattgagctgccgctgtcggttctgcctgccatgcgctgtcctttccgtcgtgtccggcttgcgtttgccggctccctaagtgtttttcaaaatgccctagagggtgccctaaacccctgtgtgcttctcggccaaaggtctggtctgatgaaccggttcgagccgcgaagaacctattaagaatagaacgaccgcccgtcgaatatggcgggcggtcgaaacgttcgtacgtcagtgcgtcagcgcgttatgcgcggtgcgtcactcggcgttgacgaggatgttggccaggttgtcggccacggcctcggcgttgtcgccttcgacgttgatgaccacggtgtcgccctgcttgatgcccagacccatgatggacaggatggagccggccggaacggcgttgccgccttccttggcgatggtcacggtctggccggaagcggtgacggcctgcgcgaacatggcggccggacgggcgtgaatgccgaccggatcgttgatgacgagattgcgggttgccataatggtctcctttgttgtggttggtggttggtttgcttacgttgggtcgtctcgatatttacacgtcgatgtatatcgatttttgcatatcgattgcattatgcggcttttgccggcatctgcatttcttgcgattatcatagcacagtttttacgaaacacagaaaacgtttaccggttttgttttgcgggaatttcgtgtatactaatcgcaggctgaaaatgatttaccggcaaagacggtggggatcattgcagtaactcacctacgcaaggtaggcataatcctgcaatcgtttgcgtatccatattttttcccaaggaaacaggaaaaggagttctcatgaacattaagggtgttggtatcggtcgtggcgtcgcagtcggcccggtcattcgcatggccgctccgctgccggaaccgtcggacgctccgcgcgccgaaagcatctccgcggaaaccgaaatcgcccgcgtcgaaaagtcgctcgccctcgtcaacgccgacctgaaccgtcgcgccgaagaagccgccaacggcgacgaaggcgccaagcaggccgccccgatcctgcaggccatcgccatgttcgcctccgatccgtcccttgcacagtccatcaaggacctcatcaaccagggcaagaccgccgagcgcgccgtgctggaaggcttcggcgcggtcgaagacatgttccgcgccatcggcggctaccaggccgagcgcgcagccgacctgcatgacgtcggccagcgcgtgatcgccgacctcatgggcgctcccgccccaggcctgccggtcagcgaaaccccgttcgtgctcgtcgccgaagacctgtccccggccgacaccgccgcgctcgacatgagcaagaccctggccatcgttacctcccagggcggtccgacctcccacaccgccattctggcgcgcgcccgtggcatcgtcgcggtcgtctccgccgccgaagccgccgaacttgagaacggcaccaacgtcatcgtcaacgcagccaagggtgagatcgtggtgaacccgagcgaagacgagatcgccgccgccgaagccgccaagtcccgtgccgccgcagccaaggaactgcgtggcaagccgggcgccaccaaggacggccacctgattccgctgctcgccaacgtcggcaagccgtccgacgccgcgaaggcgctggaatacggcgccgaaggcgttggcctgttccgtaccgaattcctgttcatcggcaactccgagccgccgagcgtcgaagagcagaccaaggcctacaccgagctgctcagccagttcccgggcaagaaggtcgtgatccgcatgctcgacgccggcgccgacaagccgctgccgttcctgactccggaagacgagccgaacccggccctcggcctgcgtggcctgcgcaccctgcgcgcccacatggacgtgctcgaaggccagctcaaggcgctcgccgccgccgacgccgcaaccgacgcgaacctgtgggtcatggccccgatggtcgccgaccagcatgaggccgactacttcgtcaagctcggcaagagcttcggcctaaagttcgtgggcgctatggccgaagtgccgtcgatcgccctgatggccgacaaggtggccgacgtggccgacttcgtgtccatcggcaccaacgacctgacccagtacacccttgccgccgaccgtaccctcggctccgtggccaactaccagaccgcatggcatccggcggtgctgcgcgccatcaagatgatctgcgacgcgggcaacgccaagggcatgccggtgggcgtgtgcggcgaggccgcggccgatccggatctggcggtcgtgctggccggtctcggcgtcaactcgctgtccatgaccccggtggcgctggacgatgtgcgcgcctccctcgccgaagtcaccttcgaagaggccaaggccaaggcggccgccgccctcaacggcgacttctacaagccggccgagtgatttttcccccttctttctttcgctcggctattccggactttgcggctgcgtcatcgcggccgcagggttccgccactgcaaatgtgcctatgagagcgattcggttctgataggccctgtttcccggaatgaccccgttccgtgcgatcgccgcgcggacggggtcgtttcggttgcgggttgcgtcgattgctgcgattgcatcgattgagccaccggcgtagacgcgtcatacggccgcgtcgcgtcacgcgcatgcgcgatactggaagcatgaagatttccgcagatttcaccgtcattcccgacgcgttcgccaaggcggcgccgcctgagaactgcatcgacggcactccgatcgtttccttccccttctatatcgacgagctcgacccgtccgtgcagttcctgcattgggaattcgtcgatcccgattccattccggtgtgcggcttccagtggaaccattggtcgctcgccaatctgcccgtggacgcgctgatgtacgatttcaacgattcccacgcgctggcgattcccgccgacttctcccgcacggtgtccgcgatgattcccgagacggtgcagggccgcacgtccgccgcgtcgccgctgctgaagggccgcagcggcgatccggccgtcaccatgcgttacaacggtccgtatccgcctgatcgggatcacgaatactacctgcacgtatggggcaccaccgcgcctctcaatggtctcaatcaaggcttctggctcaacgagatggaacgcgcgttgcgtaattccggtgcgatcgcggaccaaggcgctatcttcctgaccggcaaggcgtgaccggcgaaaccggcgagaacagccggcaaggcgcaaaccgcgtaatcgcaagaaaataccaaagaataccgcaaacgtaaacaaaacaaacgaaaggaacctacatatatggcatgcaccacgattctggtcggcaaggacgcaagctatgacggatcgaccatcatcgcccgcaatgaggacagcgcgaacggcgaattctgcccgaagcgcttcatcgtcgtcaagccggacgagcagccgcgccactacaagagcgtgctgtcccacgtggaagtcgacctgccgggcgagccgctgcagtacacggccgtgccgaacgcggatctgaaggaaggcatttggggcgaagccggcgtcaacgaggcgaacgtggccatgagcgccaccgaaaccctcaccaccaacgagcgcgtgctcggcgccgacccgttcgtggagctcactccggccaagggcaaggaaggcgaagacggctacgagccggaagtgcccggcggcattggcgaagaggacttcctcaccctcgtactgccgtacgtcaagaccgcccgtgaaggcgtggcacgtctcggcgcgctgctcgaacagtacggcacgtacgaaatgaacggtgtcgccttctccgatgtggatgagatctggtggcttgaaaccgtcggcggccaccactggatcgccaagcgtgtgccggacgaggcatacgtgaccatgccgaaccagctcggcatcgacgaattcgacctcgacgacgcgctcggaaaccaggaagagcacatgtgctccgcggacctcggcgaattcatcgaacgcaaccatctggacctggccgtggagaacgtcaccccgttcaacccgcgcgacgcgttcggctcccactccgattccgaccacgtctacaacaccccgcgcgcctggtacatgcagcgtttcctcaacccgtacgacgagcagtgggacggtcaggacgccgaccaccagccgaccgcggacgacattccatgggctcgccagcccgatcgcaagatcaccatcgaagacgtgaagtacgtgctgagctcccactaccaaggcaccccgtacgatccgtacggcaagctcggcgaccagcattcgcgccacatgttccgtccgatcggcatcaaccgtcagagccagctgtccgtcatgcagattcgcccgtaccgcccgcaggtcaaccgtgccgtgcagtggatcgcctacggttccaacccgttcaacacgctcgtgccgttcttcccgaacgtcgactccacgccgaagtacctcgaagacaccaccacgcgcgtcacctccgagaacttctactgggagaaccgcatcatcgcggccctgtgcgacgccagcttcgccgacaccgccaacgcggtggagcgctaccaggagaagaccggcggcatgggccaccgcatggtagccgccaccgacgagcagatcgaccgactggtggaaggcgtggtcgacgaattcgacgccgaagacgagatcggcgacgtgcagccgatggaaccggacgaaatcatcgaagccgtccgcaacaacgaagcccgcgaagtgctcgccgccgccaacgagaccatggccgcgcagcttaaggcggaaaccgacaagctgctcgactccgtgctctacaccaccagcatgaacatgaagaacggcttccacatgtccgacttctgatattttctgcgattgcgcaatcgcaagaaattctacgaaaacccgcgtagcaaccggcttccgcacagcgttcgccacaaacagttccgtatgacggtcggcgcgcgtccgctgtgcgggagccggttttctttggtggcgcgtgcttattagaatggcgatcgtctttgcttttccgctcgtgccggcgcgcgttgcataggcgatgtctgtcgcgtacgttgtgcgccatacagcggaatgctttcccaagaaaggaacccagtgaccagcattgaggatttcaccagccaatacggtctggtgcagaagattgatgcgttcggctatctcgattacctgaagaagaatcctgatgcgccgcgcaagcatggcaaggtcgtcctcgtcaccgccgacaccccgctgaaggcgtcccgcggcgaaggcaagaccaccaccacgatcgcgctgatcgacgcgttgcgcgaacgtggcatcgacgcggcagccgtgctgcgccagccgagcatgggcatcaccgcagccggttccaagggtggcgcctccggtggcggcaaggcctccctgacccacccggagctgatcgactggggtctgtgcggtgaaatgggagccatcgaggccgcccagaacctgttggtctcctttgcggagaaggctgttgacgacggcaagctggacaccatcctcgtaccgcgcgtctccgaagtgccgtcccgttccctgcgccagatcgcagtggaccgtggaaagggcgacgtggctgagcgtgtggtgctcaccccgacctgcgagctcatgcagatcgttgtgctgtcgcgttccatggatgagatctccgagcgcgttgccaagatggtcgccggcacgaaggatggcaaggccgtgaccttcggcgaattcgttgacctgtggcgtatcaccggcatcctcggcgacgccgtgaagccagccaagacggagaccgtgaacggctctccggtgtacgtgcacggcggcccgttcgccaacgtgtccatcggcattccgacgctggtttccgtggagatggcgtgcgcgctgcatgacgtggtcatcgtcgaagccggctacggcaccgacgctggtgcgcagaagtggctcgacatcgcctgccgcgaatacgacgcgcagtggccgtccgcagccatcgtcgtgacccgcgcttccacgtggcgcgacgatccggatctggcatggcgctacccgttccacgtccagcgcctcgaaggtcttgatattcctaccttcccgcttatcaacctgtgggatggcgaggatgatcagattccggcgctcaaggacaccgccaaggaactggaattccgcgacccgatcatcggcaacctgtaccgcgacggtggcgacgcgctcgccccgcagctcgatgcgttcgtcgatgccgtgacgaacggttctatgccggccgaaccgcacagccacaagggcatggctctggtggagaacgtgcgttgggtcgccgagcatgcgtatggcgttccggccgaccgtgtgattctgaaggacggtttcgccgagtcgttgcaggccgccgagggtctgtgcgccagcgcgggcatcgatttcggctcgcttgctctggtcgcggtgaagtctccggccaccatgaccgacaacgaccgcgctccggaagccgagcgcaccgtcacgctgaagaaggtcgaagtgcattccggcgcgggcctggtgcacgtgaacctcaccacgtcgctgaccaccccgatgccgaagatcgtctgattttcttgcgattgcgccgcgtggcggtacgtcccgtaccgtcgagggcgctcgctaatcgttgattcggcgtaaatacaaagccgctggtcccgttcgggccggcggcttttttcgtgggtgatacctttacgttgtccgtttgtgggtgcgggcgtgcttgcatgtgcgcccccttttgctcacgagttgcggaatggggcgatttttctctcttatgagcaaaagggggtatgattactgacgattttgccggttttcataccccttttcgctcacgtcccgtagaaaaggcccgtttctcgcttttgtgagcggtcgggggtgctgatattgcgatttccctgccgtagtcaggcgagcttcctagacgtgcttcccgtaggtgaggtgagaggtttgcaatatgggcaaacctcgaaggaacggtggaacttcgtcagaagtttccaccgttccagccccagtcagtcgtggcggtgtagcggatgtatgtgcggtcggccggaatgcccagctccttgcccagcgcggccatgatctgctccgtcagcttctcccaggcggaacccggcacggaacggccgaacacattcacttccacgtatgcggccggcttggaatcgtcaccgccgaaataaatcggcatattgtcttcgaacgggcacatcagccagccttcagacttgccgggaacggcagaaatcgccttgccgtaggccgtcttcagcgcctcgcgctgcccaggggtggtggatacggaaacgtgcgtgtggatgactggcattgctgctccttgcaatcgttgaaatatattgttcttcgttacccaagtttaggtggtctgcgcgcgagtgttaaatatcccgtgtgagaaaactgattgaacagcttatgaaattcggcattgtgggtgtgatcgccttcatcatcgactggggcatcctgaatcttctggtcggcctgttccacatgcataatgtgctcgccgccaccatctcgtttatcatctcgttgatcttcaactatgtcgccagcatgaagatggtgttcaagcatcgtgaggacatggctcgctggatggagatcgtcatcttcgtggtcggcgcggtgatcggcctgtttatgaacgacgccatcatctggatttccacgtacggcatgaaccatgatgcgtatgtctctcaaagcgccgaatatctgatccgtaccaacgtgggcaagcttatcgccaccgccgtggtgatggtgtggaactttgtgacgcgcaagtggttgttggacgatacgcacaccaacgccacgaaccgtctgaagaagaaggaaaaccgcctgagcccggaggagctggaggccaagtgggagagcagcttctcgcacaagctgggcgtgtggtcgctggaacatacgccgaagggctggccgaagtagctggcggcgtttcgtatacggcatacgaaaaggcgcgtccgaatcggatttttattgcgattcggacgcgcctttctgcggttggcgtacgtttcctgggattgccggctcggttatacggttcacacactcacgttggtaagcgtcggctgttcggtggattctttgatctgcttgaaaccaagcatcgcaatcgccagcgacgtcaacgccaacgccgtcaccacaatgaaaccgccccgcgagcccatgcggtcgatgaactgtccggcgatcgcggaaccgaccgaaccgccgatcgaattcattgcgcccatccaagccataccctccgtgaaacgtgtgggcggaaccaggtgcagcatcagctggttgccgttcacccacgtcggagcctggcagacgccgatgcacaggtagatgatcatgatcacccacagatgcttggcgaacatgaacgaaccgattccaagattcaccaccgcaagacagaagtagaaacgcttccacagtggaatcgtccaatttttcgcaccatacacgagcgcgccgatcagagagctgaacgagaagcaggcgaatacgaaaccggtgaactgcttcatatgcgcctctgtggcgaatgccacgatcgaaatgccggcggccgactggaacgcgcccaggccgaaccacgtcacgcacaccgcgatcaggcccggaccccagatcgactccttgcgtccggccttcacctccgcctcggccttctccatcgcagcctgcacctcggccgccgtcttgccttccgcacgcgccttgttgcgcgcgtactccaccgcggcctcggcctgcagcgccttggaccgggcggcctcgcgctcgcggtactccttgcgggtcatgcccgcctcgcgggccagctgggtctgcgacttcggctcggtcgtaagctccgtcaggaacatcagcgcgccaatcaccacgcacatgccggtgaatgagaacgccagcagacctgaaattacggccaaggtggatgccagtggattgccgatcacccacatgcattcgtcgaatacgcctgatagggacagcgcgcggttcgttttttccgcatcccctttgagcaatgtggtccaacgttgacggctcatcgcgccccacggcggaatcgccgccatgaacggcacgatgcagaacaggatccatgacggtacgcgggcggtaatgcaggataccagcgaaatcgcggcgattatccatacaatgatcgtcggaatcgaaacctgacgctgaccaaacttgtcgaccagcttgccgagcaccgggctcgccacggccagcgcgatcgcctgcacggccgtcagcgcgcccgccagcgaatagttgccgtagtaatgctgcacggaaatcgtgatcgtcatgccgaccattgggaacggcatgcaggcgattaccgatccgacggagaatcgcgcggtgtgcggtatgcgaagcagctccgcataccctccgaaaagacgttggccgatgtctttgacgccgacgaggacattgttggtcatgcttgccgctcctttccgctcacggtttcgctcgtgacgtccgcagctttgcgtcgcgtgcggactgatggtggtggttcccctgaattattggttaaccgcttccgataccagctcgctgccccagtcgtccgaacacgtcaatcgattgacatgtttgacatgccgcacacggggagaaaggtgggatggtgcgtgttgtttgtgtgtctttgttgaccaaggcaactttatgcgcaggtaccgtcgtgacacgcggtacattagggcaggaaccaatattcgaatcgacgaattttttcacagggccggcgaccggcgaaacgtgctgagccagcacgtggccggcaggtccgaaacgcaagaaaggcggccaatatgccggcgacaaccatccatttcgtgcgccacggcaaagtggagaaccccgggcacctgctgtacgagcggctgcccggtttccacctgtccgacgtgggcgtgcgcatggcgcaggccaccgcgcattacatcgcggtcagcccgcagctgaacaccgtatccgccgtctactcgtcgccgctggaacgcacgcgcgaaacggcggggaagatcctcgaatcgctgaattcggtacgtggattgcgcggcgaggaaccgctggagctgcagacggacgaacgcctcatcgaagcgcgcaacgaatttcgcggcaagcgtatcggcttcggcgaaggcgcgctgtggaagaacggcaactggaagctggtacgcaacctgtggaagccgagctggggcgaaagctaccagtcgatcgcgcatcgcatgcaggacttcgccttggagaaagtggcggaatatcccggcaaacagatcgtggtggtcagccacgaatcgccgatttggagctaccggcacatgctggaaacggggcaccccgaacacaacatgctgttgcgccacaccgcgctcgcttctatcacctccatcacttacgattgcaataccgggaaaataatgtccattacgtacgccgatccggcggcggacgtcgaataatgtgaaccaaaacatgcggtggctcaatcgcggtcggggatgactgcggttcgggccggccgcacgatatacaaggagaaagtatgtcttttgtatacgaccagaaggtcgtcgactcgatgtacggctcgcacgtggtctccatggcagttgactacggtgtcgatctggtcaagatgtggccgttgcaaacgaaccaggaactggaaaacgatgtcaaatatgcggagaacctgcaggtgatgttctccggcatgatgacgcaggtgctgctgaaacgctccgaagaagtcgaccagtcggttgcggaagccgtatacgaaggcatggatgtgcttcccggcgtcgatccggaaatcatccgcacgctgatggacgccaaccacgcctatgacgtgatggcctcctaccacggggtcgacggcatcgaactgttcatggaaaccgccagaatactcggcatcgacgtggagacccgaatcgaaaaggaaatccaagacctcatggagaacctctcacgcactatgcgcagcgcctccggattcgaagtcgacgatgacgtggcggaaaacgtcggcatctgccagtcggccacggtggaccgcaacgaattcgcaagacgctacctcgcctcgatgacggttctcgacgcgctgataaacctcatgtgctatggcaccgacgattcgcaggagcaggccatccgcgtgctgccggtgctgctgttcgtcaactccatgcgcaaccagctgtcgattccgcccactttcatcaacgccgaacagctcatcaacctgtttggtctgcgtgacaccgcccgccagttcggacggccccagtcggtgttcgacagctcgttcaacccgctgacgttctccaccaccgtcaagtacctcgctttcttcgcggggcaggaatggctgcggcatatgaggttcctggagtgggacccgaagcaggccgaacaggacgccaaagacgaggacgagcgcaaaagcagggaagcgctcgcaaagaaatacaatttgacgagcgatggcgataacgcggcttccgacgcggatttggattcgtctgcagactcgaatttgtctgaggattcggactcgtcggaagaggccggttcggagccgaccgaggaataagtgttgcgggcggtcgtgtgacgtctgacggtgaaggctttgcgtgtacttgcgttgcgcgcgcttgtgcttgcgctcgaattgcgcgtggccgtcgcctatcccacgcgttacatccgcaacgacgtcactacccgtaacgaatgatctgaaacgaataatcccggtatcctgcgattgcacaggataccgggattattcgttattcgttatggtgtgccacgttttgtgtggcgataaggcggggatcagagcgaaatcagagctgctgatcggtgccgttcgccgaatcattcggtactgccgaagcgtccgaatccgccggagcgtcggtattcggctgctcgtgcggatgctggaactgggccggcacttccggcatcggcggaatggacggtgtcggaggcatggtcggaacagccggcatcggaggcatagatggtacggacgaagcctccgccagcggattctgctgaggtgcggcgtattgcggcgcggcgtgctgctgcgcggcgtcatactgcggtgccggagctgtgtacgaatcggccggagtcgctggtgccgtgtacggcgcggccggtgccgcagccgccggattggtcggcagcgggacgttgccgtacgaggtggcctgcgccgcatacgggtctgccggagcctcgcccgtggcgggagcccatgcgttggaagccgtaggagcgtcgaaacgcgtgccttccggattggaatcgcgggccatcagcacaaagtagaacacaccgctggcaatgaaggccagcacgccgaggatcagcaggacaacgccgccgatgctgacgctgttgcctgcctccaacgacctgaacgaaagactgctgccgatgatgaggatcagaccgatggcgaagaagattccggcggccgcctgtaccgcgtagatgatggccagcacggtgccacgcatgttgatgtcatgcagacgacgtacgccaagcgcgatggtcggcacaagcacgacgagtccccaaatggaggagaacgagtctccgacggtggcgatcacgccggaatcggtgaggttcctcaacgtgcggaacacgagtctcaacacgaaagtgacgacggtataggtgaggaaccaccaccagaactcgctacgcgaggcgcggcccttgaacaccgcgtacttcttgaagaaacggacgatcgcctcgcccaggttgcagccatatgcgggcatgtcaagcggcgcggtcaatgcgaagaagctattgcccgactgcggttgcggtgccggctgcccgtaattcgcggctggagcctggccgtactgaggggcctgtccatattgaggggcctgagcgtactgcggagcctggttgtattgcggttgcggtgcttggccgtactgcggagcctgaccatactgaggtgcctggttgtagtccggggtggcgtactggggtgcctgcgcctgcccgtaatccggtgtgccgtactgcggtgccggctgcccgtagtcgggggcaggagtctggccgtactgcgctgccggctgcggcacctgcggattgtattggttggggtccgtcattagagtgccctttcacaaaacggtgactaaagaataaagaaagtcgcctcatacattactcctttgccgatgtgaagatagggaaaaatattgcagtatggaacgctgcggaagaaaaacggcgattgggtcgtggcacgtccggtttgcgcggcacaatggagcctatgactgaagttgaaaataccaaaccggaacttcctgaaaacgttcgtgtgcgtttctgcccgtccccgaccggcattccgcacgtcggcatggtccgcaccgcactgttcaactgggctgaggcccgccacaccaagggcacgttcgtgttccgtatcgaggatacggacgcccagcgcgactccgaggaaagctacaaccagatcatcgaggccctgaattggctgggcatcgactgggatgaaggcatcaacgtgggtggcccggacggcccgtaccgccagtccgagcgtggcgacatctataaggacgtcgcagccaagctgctcgaagccggctacgcctacgaatccttctccactcctgaggagatcgaggcccgcaacgtggccgccggccgtccgaaggctttcggctatgacggctacgatcgcaacctcaccgaagagcagaaggccgcgttccgcgcggaaggccgcaagccggccctgcgtatccgcatgcccgacgagggcgtcgcgttcgacgaccttatccgcggtcgcatcgaattcaaggccggttccgtgccggattacgtgatcgtgcgtccgaacggcgacccgctgtacacgctgaccaacccggtcgacgacgccatgatgcgcatcaacgtggtgctgcgcggcgaggatctgctgagctccaccccgcgtcagatcgtgctgtaccgttacctgatcgagctgggcgtggccaaggaaatgccgctgttcggccacatgccgtacgtcatgggccagggcaataagaagctgtccaagcgcgatccggaatccaacctgttcctgcaccgtgacaacggcttcatccgtgagggcctgctgaactacctggcgctgctgggctggtccatcgcccccgaccgcgacgtgttctccatggacgagatgatcgagaagttcgacgtgcgtgacgtcaaggccaacccggcccgcttcgacatcgacaaggccatctccatcaacgccgagcacatccgcatgctcgaaccgcaggacttcctgaaccgttccgtgccgtacctcaagcgtgacggcgtggtgtccgccgattcctgggacgcgctgaccgaccgtgagcgcgaggtcctcaccgccgctgctccgctcgtgcagccgcgcgtgcgcctgctgggcgaagtggccggcatggtcggctccctgctgtccaccgaaggctacatcgagccggacgccgacgccaagaagcagctgaaggattccgctccggccgtgctcgacgctgcgatcgcggcgctggacgccgttgctgagggtgattggaagaccgacttcctgcacgagacgctgaacaaggcgctggtcgaagacggcggctacaagccgcgtctggctttcggcccggtgcgcgtggccatgagcggccgccgcgtgtccccgccgctgttcgaatccatggaaatcgtcggcaaggacgttgccatggctcgactcaagggcctgcgcgagcacctgtgagccgttgagctgctgactgttagctgaatgatggaaacccgccggagtgattcggcgggttttcgtttatgcggaaggctggtgcggaatggcggaaaatagcgcgacacgccgtaagttgcgcgactgtgctgtttcgcgtatatttatcactcgttgcggttcacagcctagctgagaatcacagcgataactcaagcccccgtcgtctagcggtctaggactacgccctctcacggcgccaacaccggttcaaatccggtcgggggtacgacggacaacttttcgaagttgccacgcctgccaaattgggatgtggtgtaattggcaacacagctgattctggttcagccattcttggttcgagtccaggcatcccagccaatgagccctcgcagatgcgagggttttttgtttttcgcacctgtctgttcacgtcgctttgggcggtgggttgatggattttgccggatgcgatgtggcagcgcaatctgctgacgccctgcgtgaatcgcacatgtaatcgcccaatgttgcattaccctagaagtatgaccgaattgcagcatgccgccaaagccacgcgcccgcgcatccaaccagcggaagagggggaccgtcgaccgctttccgtatccgcacggcttggccgcctgcaattccaccagtccggcaaattccgcgtattgcaattcgccgacatccaagacgggccgaaagccagcaaagacaccatcagcctcatcgaggcctcgcttgacgccacacgccccgatcttgttattttcaacggcaaccagatcgccggatatgattccgcgtacgcgctgacctcccgcaagcgtcgctgggacgcgcgtccggcatccgcatcgtccgaagcgtccggggaacgctatgcggccgcattggaacacacccgcgaattggtgcgagccaccatcgaacaactggtccacccgcttgccgaccgcggcgtgccgtgggctgtgacgttcggcaaccatgacttccagtgcgggctcgacaatgacgaaatcgaaagcatctgccgcgaattcccagggtgtatcaatccggaacgcgctgccgacggcacgacgggcatcgccgtgaaacatggtgtgaaacatgatgtcggcgatatggaacaggacttcggattgccggaacagcccgtgatcgcgtgcgcgcccggcacattcgcgttgtcggtgacggacgtcgatcgcacgtatgacgtgttgggcttggtcttgctggattcgggcgattacgcgcgttccggcggctacgggagcccgtcggaagccgcgctgcgcttcctggcggatgcgccggggctgatggcggcgcaatcgcagcagctgcaacaagaccggcaagatgaacaggactcgccgcgcgaaccgcgcaagacgccgtccacgctgccatgcatggtgttccagcatttcccgatcgaacagtattaccgcttgctcaagccggtcgcggccaccgctgcgcgcgcgattgaaggataccgcaacttcgcggggcggcatttcgtgctcaacgaagacaaaacgcagcccggaagctatctgggggagggcgtcagctgcccggatgccgacagcggcgaattcgcaatccttgacaaggcgggatattttgcgatttccgccgggcacgaccaccgcaacgccttcgtcggttccgtgccggtcggaaccgacggtgaccggcagatggtgatggtcgcctcgccgaccagcggttttggctcatacggcccggtgccggccaagcgtgccgctcgactgttcgaattcgacatccgccacccgtacgagccgcgcacgcagctgttggaatacgacgagctggtgggcaaacccagcgcgggcaaggcctacgcctacggcatgaccagcgaatcgaagcccgattcggaaggcatggacctgctccacaggccgacgtggtggagcaagacgtggaacaagctggtctcactgttccgccggtgactgttctggtttccggcatccaactttggaatgaatacaaaaaagctgacgatgggaactttccatcgtcagcttttacgttacgtatgcgactggtcgcggacctgtcagcggccggacgaagccttgatcagcgcgtcggtaaggtatttgccggcggccatgaccagcggcgcgtaacggcgaccgggattggcgcccatacggccgttcgggccggaaatcgaaatggcggcgatcacctgtccggacgcgttgcgaatcggcgcggaaatcgaacacacgccctcatcgcgttcattgattgactcggcccagccgcgcttgcggacggcggtgagcttggccgcagtgaacttggcgtggcgaagaccctgatgcagacgttcggaatcctcccaagccagcagaatctgggctgcggaaccggcttccatggacagcatcgcaccaaccggaatggaatctcgcaggccggacgcgcgctcgacggctgcgatgcagacgcgctgatcgccctgacggcggtagatctgcgcggattcgccggtgcggtcgagcagggtctgcagaatcggcgcggcggcggtcaacaggcggtcctcgccggctgcggccgcaagttccgcgaatcgcgatccgagcacgaaacgaccgtgctggtcgcgcaaaacgaaacggtgacgttccagcgcgatcgcaagacgatgcgcggtcggacgagccagaccggtcgcggaaaccagctgtccgagtgtggctgggccggattcaagagcgtcgagaatcttgactgtcttgtcgagcacgccgaccccggaatgaatttcgttgctttgcggggtggctgcgtaattgccgtttgcctcgttcgtggcgttcatggcctgcgttttgggcatggcgttgctcgtattcgaagaagaagtcatacgctgaattatgccatctcacatattgaaatgcaaaatgtatgtggttcgcgactggggtaaagcagattatttaccttgcttccaccggctggcgaagctgggaaaatgctgaaatttcaacgattgcgcatatgccgtaagaagacgggaagtaacttttccgcgtttgccgcgctcgtccctcgttcatatctcatataccggcatgaaggacctcgaacccgtttcaagcccataggcttatagcacgaagaatgcggcaaggcaatagccgcgaggaaattagtgaggaaaaatctgaggaggtcccacaatgggaactacattggccgagaaggtctgggccgatcatttggtacgcaagggtagcgatggggctcccgacctgctgtacatcgacctgatgctcatgcacgaagtgaccagcccgcaggcgttcgaaggtctgcgtctggcaggacgcaagccgcgtcacgtcgaccagctgattgccacggaagaccacaacacgccgaccgtcgacatcgaccgtccgaatccggacgagacttcggcgctgcagctgagcacgctggaaaagaactgcaaggatttcggtgtgcgtctgtgcccgctcggcgacgctgaccagggcgtggtccacgcgttcgctccggtgctgggtctgacccagccgggcatgaccatcgtgtgcggcgactcgcacacctccacccacggcgcgttcggtgctatggccatcggcatcggcacctccgaagtggagcacgtcatggccacgcagaccctgagcctgaagccgttcaagaccatggccgtgaacatcgaaggcgacctgccgaagggcgtcaccgccaaggatattattctggccatcatcgcgaagatcggcaccggcggcggccagggccacgtcatcgaataccgtggcgaagccatcaagaagctgtcgatggacgcccgcatgaccatctgcaacatgtccatcgaagccggcgcccgcgcaggcatgatcgccccggacgaggtgactttcgaatacctgaagggccgtccgcacgcgccggaaggtgagatgtgggacaaggccgtcgaatattggaagacgctgaagaccgatgacgatgccgtgttcgacaaggaagtgaccatcaacgccgaagacctcgagccgtacgtcacgtggggcaccaacccgggccagggcgtgaagatctccggcgtggtgccggatccggcctccttcaacgacgagaccgagcgttccgccgccgagcgtgccatcgcctacatgggactgaagccgggcatgcgcatcaaggacatcgccgtggacaccgtgttcatcggctcctgcaccaacggccgtcttgaggacctgcgcgtggccgcctccatcatgaagggccaccacaaggccgacaacatccaccgtgtgctcgtggtgccggcatcctcccgcgtgcgtctgcaggcggaaaaggaaggcctcgacaagatcttcaaggacttcggcgccgaatggcgtaacgccggctgctccatgtgcctgggcatgaacccggacaagatggtagcccgcgaacgttccatctccacctcgaaccgcaacttcgaaggccgtcagggcaagggttcgcgcacgcatctggcgtcgccggccgtcgccgccgcgaccgccatccgcggcaccatctgctcgccggccgacctgtgagcctgctgcgagcggaagctgcgaacgcaatcgtaagtaatcgaaatatcgaaatcgaatatcgataggcaatcgaaggatttgttgacatggaaaaactgactacccttaccggcgtggccgtgccgcttcgccgttccaacgttgataccgaccagatcattccggccgtgttcctgaagcgcgtgaagaaaagcggcttcgacgacgccctgttctacgcgtggcgccgcgacccggaattcgtgctgaacaagccggaatacaagcagggcaagatccttgtggccggcccggatttcggcattggttcctcccgcgagcacgccgtgtgggcgctgcacgattacggtttccgcgtggtgatttcctcccgtttcgccgacattttctacggcaacaccgccaagaacggcgtgctggccgcaattatgccgcaggaatccattgagctgctgtggaagctgctggacgaggagccgggccgcgaaatgaccgtcagcctggaagaccgtaccgtcacctgcggcgatgtgacgttgccgttcgaagtgaacgactacacccgctggcgtctgatgaacggctacgacgacatcgacctgacgctgcagcacgaagacgacatcatcgcatacgagaagatgcgcgccgaaaagttcccgttcaagccgaagaccctgccggtcaagcgcgagccggaacagccgatcgaatccgcccgtgagggtgaataccctgattggcaaggcccgttggccgatcgcggcatcatctgacgcgatggctggtcggcagtgcagtgcactgccgacagggccttgcccgagtccgaaatgagggcagcaatgagcctgcgcgcagcgcagtccgtaattgcagataggcccgttggctgatcgcgacggtagcccatttcatcattggctgaccgcaaccacatctaacttttcccaagcccggcacccaagccgggctttttgtttaccttccatcacctttccgccaacagcaaattccacaaagcggtggcaaagcgcgcgcaaagcggtggtaaaatcataatacgacggcaaagtggcggcaaagcgagcgtaaaacgcgtggtaggtaaggcggtgatggccaatggacggtagcgagcacgatgatgcctggtggtcccgggaggttcctcggatgcgtgaaggcaaccgtttggaagcgaaacgtgccaagggcggcctgcctcacagtttatgggagacgtacagctccttcgccaataccgaaggtgggctgattctgctgggcgtgtccgaacatgaagaccattctttgtatatcaccggagtagatgatgcgcggaacatggcgcaggatttttggaacatggtgcatgatccatcgaaggtcagtgccgttgtgctgagcgacaacgacgtggtgattcgccatacctcgcagggagatgttatttccatcgacattcctcgtgcggcgagggactgtattcccgtgtacgtgggccagaatccgatgacgggctcataccggcgtaatggcgatggcgattatctgtgcgatgaggaaacggttcgtgccatgcttcgggacagtgacctgcttcccttggacagaacgattgttgaaggcatgggtgctgacgcgctcaacgcggatagcgtcgcatcatatcgtcggcagttcaagaacagacggcccggccatccatgggtcggattgtctgatgaggatttcctgcttcgcatcgaagcgttgcggcttgatggttctcaggtgcgtcccacacgagccggattgctgatgttcggtgaggcgtggcgaatcacgtccgaattcccctactatttcctggactatcgcgaggtcatggacgaccaggagcggtggaacgaccgattcacttcggacgatgacacgtggtcgggcaacttgtacgatttttggggcaaggtggtcaatcgtctgcggtcggctgttgcccatccgttccagcttgatgccgatttgcataggattgatgacaatccgatggataaggccgttcgtgaggctgtcaccaacacgctcgttcatgccgattacttcattcgccggggcacggtgatcatccagtattacgacagaatcgtattgtcgaatcccggcagcctgcgtctttcctccgaagaggtgatgcaaggcggcatttcggatacgcggaatcccacgttgatgaaaatgttcaatctgattggcatcggagaaaaggcgggcagtggttttgacgtgatgcgtgaaggctgcctgttcgcaggaaccgccgcgccggaattggaagtgttcgacgatccggggcgtgtgcagcttacgttgtatccgcgcaagatcgccggagattccatgatcgccggagcttctgctgttcccggagtctctgcagatggcgggggccctgttggtgcggagtcgccgacaatgcggaattcggagcatggcactggtacggtccataggattggcgctcgcggggctgaccgtttgaacgacatggtcggcacattcggcaagaacgtggccctacctgccgatttcggcaatgcgatcaggccgcaaagccagttggagaaaatcacctatgcgttgacggtcggcggaccgcaacccacctcgtatctggctgtggtgctggggcttggcctcacccgtacccgggagatattggcctcactggtgaaagacggtgttattgaaccaataggcgtcggacgcggacgcaagtaccgtcttgccgagcataccggctcatgacggcgttccggttctctggacttgacctggatcgagagcccaaactcgtctggggaagtcctagccaaggaggtttccaaggtgagacggggcgtgcaggcgggacgtgtgtcgcgttacagtggacatgacatttcgtgtgttcgcatcgcatatccaaaacatgacacgagaacaatttcggggagcagtatgagccagggtttcgcgccgttttacgacgtcaatcgcacgtatgaagacaactatctgcaggggccgttcggtgcgttcgccgaagtgatgaagggcgattccgctgccggcgcctccgcgcagtctgcacagaccacccagtcgcagtcgtccgaccaggccgaggaattcctcggcttccgcgtgaacctgccgtttggcattcccgccggtccgctgctgaacgagcggttcaccaccgccgccttccgcatgggtttcgatttggcggtgtacaagacggtccgctcccgcgcgtggggttgcaacgccttcccgaacgtgctcgccgtgcatccgaagaacgcagacgggtcgctggttcccggcagcgccgaactggatgaaggcgtgcttgccgacacccgatatgagcttccgatttcgatctccaacagtttcggcgtgccgtcgcgtgaccccgacgaatggcagccggacatgaagaaggcgatcgccgccgccggcgacgggcagctgctcgtgcccagcttccaaggttcccgcgtggacggcatggaccgcaaggcgtacatcgccgaccatgtcaccaccgcgcatctggttacggaaaccggagccggactgatggaaatgaacaccagctgccccaacgaaggtcacaatcgcctgctgtgccacgacccgcatctggtgggggaaatcacggaagccgtgaaaaacgaaatcggcgatcgcccgctcatcgtgaaactcgcctacattcccaacgacaccgacctggaaaccatggtcagggaaaccgtcggacatggcaccgtgcaaggcttctccaccatcaacacgatttccgcgcgcctggtggacgcgaacggcaaccaggcgctgccgggagtcggacgtgaccgttccggcgtgtgcggcaacgccattcgtggcgccggtctcgacatggtcggcaggctcgccgccatccgtgaaaaactcggcttcgacttcgccatcgtgggcgtgggcggcgtgatccgtcctgacgactacaaggcgtaccgtgaggctggcgcgaacgccgtgatgagcgccaccggagccatgtgggatgcgaatctcgcgcgcgaaattaaggagacactgcgctgaattccgtttttcgcgaacatgctacatgccttatggcaaactaagcagcagtgttttttgagcttgatccaaaagggaatcgaaagaggttgagcgtgtctgacaataagaacgacattctgcacgtcgaaggcggcaagccgctgaacggcaccatcaaggtgcgcggcgcgaagaacttcgtaagcaaggccatggtcgccgcattgctggccccgggcacatccgtgctgaagaacgttccggaaatccgcgacgtgcacgtggtgtccgacctgctgcgcctgcacggcgtggacgtgaccgtggacggcgcgaacggcgtggtgacgatcgacgccaccaacgtgcaactcgccgacgtggccgacgtggacacgctgtccggctcgtcccgcattccgattctgttctccggcccgctgctgcaccgtctgggcgaggcgttcattccggcgctcggcggctgcaacatcggcggtcgtccgattgacttccatctggaaaccctgcgcaagctcggcgcgaacgtggacaaggaacacaaggacggcattcacatcaccgctccgaacggtctgcatggcgcgaagatccacctgccgtacccgtccgtgggcgccaccgagcagacgctgctcgccgccgtgctcgccgaaggcaagaccgagctttccggcgccgccatcgaacctgagatcatggatttggtgagcgtgctgcagaagatgggtgccatcatctccgtggacgtggatcgtactttccgtatcgaaggcgtcaaggagctcaagggctacacgcacacgtcgttgaccgaccgcatcgaggccgcctcctgggcgtccgccgcgctcgccacacatggcgacatcttcgtcaaaggtgccacccagccggaaatgatgactttcctgaacgtgttccgcaaaatcggcggcgaattcgacatcaccgacaagggtatccgtttctggcatccgggcggagacctgaagccggtagccatcgagaccgacgtgcacccgggcttcatgaccgactggcagcagccgctcgtcgtggcgctgacccaggccaacggcctttccatcgtgcatgagacggtgtatgagaaccgtttcggtttcaccaagccgctggtgcagatgggcgccacgattcagctgtaccgcgaatgcctcggttccctgccatgccgcttccaacagcgcaactacaagcattccgcggtcatcttcggaccgaccccgctgaccggccgtgacatcgacgtgccggatctgcgcggcggcttcagccacctgatcgcggcgctcgccgccaaggggccgtccaacgtgcagggcatctccctgatcgaccgtggctacgccgacttccgcggcaagttggaagccctcggagccgacttcgactgattcgctgcgattggttcgatgaatcggctgcggctgatttattgcgattgaccagtcgcgctgaacgcataccacctttcaccggtactcgccttacgcgggtgccggttttgttttatccgcgattgccgctgccgcaatcgcaaacctgctttccataccttccacatcttccgcatattccttttactgccttatcgcccgtcttttctgcatcatttgacggccaaatgatgcagaaaacgatggcatgaggcagtaaaaagcaagataacgcggaaaacatcgatgacgaacgtatcggcggccggtggcacaatgggagccatggcatccaaaggaaaaccgtcgccgcgctccgcagtgaagccgctgagcgacgagcaagtcgcaaaactcgcgcagaagcatcatcttgtagacccgacccacgatttcccgaccggtccgcgcaaagccaacaccgcggaaatcgaagcgcagaaccccaaagccacgcatcgcctgctgaccggctgcgacgtggtgctgcgcaatcacagcaaagtgaaggcctggggcttggaacacgtgccggaaaccggcccgttcatcaccgccgccacgcatgtgaccatgtacgacgtgttcgtgccgatggtctcgatgttccatcagggccgccgcccgcgctacatggccaaggcggaaatggccaaatggccgctgatcggcaaatggttccagctggtcggcatgcagccggtgcagcgccgcgcgggcaaggccaaagccatcgaggaaacgtccgtggaaatcctcacttccggccgcccgctgaccgtatggccggaaggcaccgtgacgcgcgacccgcaaaaatggccgatgagcatgaaaaacggcgtgggcgtgatcgccctcgaatcctcacgccgactcggctgccaggtgccgctgtactgtgccgtgacctggggcgcggccagcatcaaccactggtggccgtggccgcgcaagaacgtggtgatgtgctacgacgaagcgctcgactacgcggacctgcttgacggctgcgattcctggggagacgaagtgccgacggaccgcgccgacgaactgacccgccgcatccgcgtgcgcatgaccgaaatcatggccgaaatccgcggcgaacaggcacctgacggctactgggactaccgcaccatgagtcgcgtgaaagactgattttcccccacacacccgttccggcggcgaacaaaatacgcgtgcgaccggaacacgcggccggtgtgcgtagccggcggtagcataagacaacgtcgattgaaagcggcggccgatgtggcatacgctcggccgcaaaaagcaatccaaataatccaaggagcaaaattcatggcgaatgtgacggtactgggcgctggcgcttggggaacggccttcggtcaagtgcttgccgacgcgggcaacaacgtgaccatgtgggccatcgaaccggaaatcgtggaaggtattcgtgaccatcaccacaacggtgtgcgcctgcccagcgtggaaacgctgcccagcaacatgaccgccaccggagaccgcgccgaagccgtggccaatgtcgacatcgtcatcgtggccatcgccgcgcagttcgcacgcgtggcactgaccgaattcaagggactcatccccgagaccgcgctcgtggcctccctgatgaaaggcatcgaacgcaccaccggcaaacgcatggacgaagtcgtcatggaaacgctcgaccttccggcggaacgcttcgccgccatttccggaccgaacctgagcaagcagatcgccgaccgcgagccggccgcgaccgtggtcgcctgcacggacatcgacaacgcgcgtaccatcgccaccgcctgcaccaccgactacttccgtgcgttcgtgacgcgcgacgtgatcggcttggaaatgtgcggatcgctgaagaatgtggtggcgctcgccgtgggcatggcccgtggcgcaggctacggcgagaacaccgcggccatgatcgaaacccgtggccttgccgaactgaccgcgctgggcgaggcggccggagccgatccgaagaccttcgccggacttgccggcgtgggcgacctcatcgccacctgcggttccccgctgagccgcaactacacgttcggctccaacctcggcaagggtctgagcgtcgaagaggccaccaaggtgagcaacggcgtggccgaaggcgtgccgaccaccgacgcggtggtggcgttgggcaagcagtacggtgtgccgaccccgctcgccacggccatgagccacgtgctggacgacggtatctcctgcgcgcagatgctgtccgaactgttcggcgaaggcatcaccgaggagtagcagccggcttgtatgctggatgcttggcaaaaatcctgaaaagtcataaaagttaaggaataaaggctatagatatggcaaaaaagcgcattgtggtgatgtacggcggcaaggccgacgagcattcgatctcctgcatctccgctgcgagtgcgctgcgcgcgctggacacggacaagttcgaggccattccggtgggcatcaccaaggatggcaagtggatcgtcaacggtgagaatccgctcggatggagcctggacgaaggcctgccgacagtggagaaaacccccggcgccaaggaagtggtgcttgaagtggctctcggacaggacggcttcttcgcccgcgaggatgacggtacgctgaccccgttcggccatgtggacgcggtgttccccgtgctgcacgggccgtacggcgaggacggcaccatccagggtctgttcgaaatgatgggcgtgccgtacgtggggtgcggcgtgctcgcctccgcggcctgcatggacaagcattacacgaaggtgctgctcgcggccgccggcattcccgtcgcgcccggcatcacgctcgacgcgcgttccttcgacaaggcttccgaattcaaggccaacgccgatgcgatcatggcgcaggttagcgaagccggcttgcagtatccgctgttcgtcaagccgtcccgcgccggttccagcttcggcgtgaccaaggtggagcatgagggcgatgcggccgaacttgcggccgccgtgtacgaggcgtcccgccacgattggcgcatcctcgtggaacagggcatcgacgcgcgcgaaatcgaatgcgcagtattgtgtccgaaggctggcgaagcgccgcaggccagctggccgggcgaaatcgtgctcgacaagcgcgccgaaggcgacgaccagttctacgacttcgacagcaagtacatggacgccgccgcaagccacgtggaagtgcccgccaacctgccggaagagacgctgaacctcgtgcgcgaaaccgccaagaaggcgttcgtcgccgtggacggtgccggtctgagtcgcgtggacaccttcgtgaccaaggacggcaaggtgatggtcaacgaaatcaacaccatgccgggattcacgtccatctccatgtaccccaaggcatgggaggccaccggcgtgcgctacaccgacctgatcaccaagctgatcgaaggcgtgctgcgctgaatcctgaatctcatccgagctgagccgaagccgtgctgcatttcgagctgaaaagcgcaaagaaagcaacacgaaaaaggccagttcatcgtaagtttgccgaagcgaaacgggaatattcctaaaaatcgcttcggctttacttattctttgacactgcgttaggtaacgccattacgtttccatgttgtcgattccaagaacaacaaaacaacaaaggaaacgaaaacgatgaacgctttgcgcaagatcgccgtcggctcgctcgccgccgtgctcgcatgctccatggccgcctgcggatcaggtaacgccaattccaccgatagcgcctccaacaccggtaaaaccgtgaaagtggacgaaaagtccgcaaaggccacttcgatctccgatttcggcggcatggacggcctcgtggccgctgccgaaaaggaaggcgcgctcaacgtgatcgcgcttccgcacgactggtccaactacggtgacgtgatcagcggcttcaagaagaagtatccgaagatcaagatcaacgagcagaacccgaacgcctcctccaaggaggaagtggacgccggcaagaccaacaagggcaccgacgccgctccggacgtgtacgacctcggcctggccgtggcctccaccagcaccgacaacttcgcctcgtacaaggtgcaggcctgggacaagattccggattccgtcaaggataaggacggcaagtactacgccgactacaccggcatcatgtccatcggctggaacgccgacaagtacggcgacatcaagtccatcaacgacctgaccgacccgaagttcgccggaaccgtggcgctcaacggcaagccggccgaagccggcgccgcgttcaacggctacctgatgatcaaccagctggccggcggcgacatcaagaacctgcagccgggcctcgacttcttcaagaagctcaaggactgcggcaacctcaccaccgtcgacgtgaccgacggcaccatcgactccggccagaccggcgtggtgatggactggacctacaaccaggcctcctaccagaagaacctcaaggccaagggcgtgaactggaagttcaagaccttcaagaacgcccaggtggtcagctactacaaccaggccatcaacgtggacgccccgcacccggccgcagcccgcctgtgggaggaatacctgtacagcgccgacgcccagaacgactggttcaagggcggcgcgaacccggtactgctcgactccatgaagaaggacggcgccgtcgaccagaccaccctcaagaacgccatcaccatcgacggcgatccggtgagctacaccaacgaggattccacccgcatcaccacatggctccaggacaactgggacaagaccatcggcaactgacatgaccgcagtgcttacctcaggagctcacgccaagcgcgcgggctcctccgccatctcgtttgccgcgcataggcgtgaactcggcaccatcgccgtgtccatcccgttcttcgcctacaccgcgtgcttcctgctcgccccgacggtcatcgtcatcgtgggcgccttccaatccgccgacggcagcttcaccgtggcgaacttcaacaaacttttcgaagcgaacaccatcgccgcattcggcacatcgatactcgtatcggtcgcatccgcggtcatcggcgccatcgtgggcgcgctcgccagctacgccctcgtcatcggctccaagccgaacggcctgctgcgccgcatgatttcggccatctcgtcggtactcgcccaattcggcggcgtgatgctggcgttcgcgttcatcgccaccatcggcatcaacggcgtgggcaccatgctcatcaaacagctgaccggctacgtggtgaatccgaactggctcagctcgctgccgggcctgatcaccatctactgctacttccagattccgctgatgatcatcatcttcctgcccgcggtcgattccatccgcccgcagtggcgcgaagccacggaaagcctcggcggcaacaccttccaatactggacgcgcgtggccggcccgattctggcgccgcgattcatctccgcgttcctgctgctgttcgcgtccgcgttctccgcatacgccacggccgccgcgctgttctcccagcgttcgatcctcgtgccgctgatgatccaaggcgcgatgcgcaacgaaatggacccgaaccagcaaggcttcgcgcaggtgctcgccttcgccatgatcgtcgtcgtggcggtggtcatgatgatcagccacgccgtggaaaagagggcaggacgatggcagtgaacgcaagtgcgcaaaacgtaagcgcgaaatcgcaggaaaagcagaacatgcaggaatcgcaaaccatgccgccgcagctgcgtgcggccagactcggcaagcaacgcatcgtcaaaaccatcattctcacggtgacgttgctgttcctgttcgtgccgctggtgtccatgttcctgttcaccatccgacacccgttgtccggaaaatggagcttcgacccgtggatcgccatcttcaccggcgacggcagcgcgctcggcgccgacctgagcaccctgtggagcggcctcggcgcttcgctcgcgctgtgcgtggtgaccgtgctgatcatgctcgtgctgctcgtgcccaccatggtaatcgtgcacatccgctcgcgcagactggaacgcgccatcgaatgggtggccacgctgccgctgaccattccggccatcgtgctggtggttggcctgggaccgatctaccgctggctgtccgccgacgtgctgagcaccaacccgatctggctgtgcttcgcctacgtggtgctggtcatgccgtttgccttccgcgcgcttgcggtgggactcaattccatcgacgtgaagacgttatgcgaggcctcacggtccctcggcgcttcatggccgcgcgtattcttccgcgtactcattccgaacctgtggcagtcgatcctgtccgcatcgttcatctccatagccgtggtgctgggcgaatacaccgtcgcctcactgctcggccgtatgaacctacaggtcgcgctgtaccagctcggccaatccaattcgcaaatctccaccgcaatgtcgctgctggcactgctattcggcgtgattctgctggtggctctcgatctgatttccagcgcgatgcgtcggaacaaggaaggtgacaactcatgactctcgccgaacagaaggcggtggttgcccatacctcggaagcgttctccgataccgaatccaacgtggtgaccgaagcggcgaaggccgtgctcaaggattccgaagcgcgcggcggcggtgtgcagatgcttggcgtagacaagatttaccccggttcgaccgtcaaggcgctggacgatttcaatctggaaatcaatccgggcgaaatggtggtgctgctgggcggctccggctgcggcaaatccaccgcgctgcgctccctggccggactggaagacattcaggccggacgcatcctcgtcggcggccaggacgtgaccggcgtgcccgtcaacaagcgtgacatggccatggtgttccaggcctactcgctgttcccgcacatgaccgcgttgcagaacgtggaattcggccttgaaatccgaggcgtggaccgtgcggaacgccgccgccaggccatggagaagctggaactggtcggacttgccgaccaggcgaaaaagtacacgcagcagatgtccggcggccagcagcagcgcgtggccctggcccgtgcgctggccgtgaacccgcgtgtgctgctgctcgacgagccgctgtccgcattggacgccaaagtgcgcgtgcagctgcgagacgaaatccgccgcatccaactcgaagccggcaccaccaccgtgttcgtgacccacgaccaggaagaagcccttgccgtggccgaccgcatcggcgtgatgaaccacggccgcatcgagcagatcgccgacccgcagacgctgtaccgccgccccggcacggaatacgtggccaccttcatcggcctgaccaaccgtctgccgggaatcgccaacggtgaggaggccgtggtgttcggccagcgcgtcccgctgctggacggttccgccaccgacgcctccacggtgctggtacgccccgagaacatgacgatcgaactgaccgacgatgccgatgccgtccacggagccggcgaacttggccgcgtggagatggtgcatttccttggcgcgctggcccgcgtggacgtgcgcgtagcctgcgcaggcatgggtggcacgattcgcgtcaccgtgcagctgccggccaacgagctgcccgcaggacttgcgatcggagcgcaggtcgtggtcgcgcctcggccgattccggcgctcgccgtctgacgattggttgctgcgcgcgattgtcgcgtaccgtcattgcgtgcgatcgccgtgtgtgattattgcgtacggtcgcccatcgcgtgagccgagccattcgcagggctgagattccaagctgatattcagagaactggtagtacagtgctgaatatcagcttttttatttgcttgccgtaagttcgtaaggtgaccatgacgtttccgcaacaaccgcaacagccgcagtgcccccagtatccgcagggaccggcaccgcaatatccgcaatcgcaattcccgcagcagccgctgcagtattcgcagcagtttccgcagccgaatcgcaatccgttcttcgaatggcttcagcgggcgaaacgcgacttttcgcgcatcggcgcaagcctgtgcctgatggtgatcatctggtacgcgggcgtcttcctgctcaaaggcgtggtgcgcgcggtcgcgggcggtgtaggcgccggcggcgatatgccgaattggatgacgttcctcatttccgacgtgccgctgtatctgatcgccatgccggtcgcggtggtgctcatgggcaaatcgaccgtcatcgaaacccgcaaattcaatatgaaaccgggcatgttcttcaagctgctgctcatgtgcctgccgatgatgtgggtcggcagcatggtcggcagtatgctgtcgctggcgctttccgacggtgaagccacgaaccgcgtagccgatcttgccatgcagacgaacatctggaatgtcgtgttcttggtgattcttggcccgattttcgaagaatggatgttccgcaagcagctcatcgaccacacccgcaaatacggagagaaaacggcgattctgctgtccggccttgcgttcggactgttccacatgaacctgttccagttcttctatgcgttcctgctgggagtcatgttcggctacatctacatgcgcaccagcaaactgcgctattcgacggccatgcacatgatcatcaacttcaacggcggcgtgctcgcgccgtggattctgacgcgcgtcgacctggaccagctggacaaggtgtctcaggccgcggaaaacggcaatgtggcggcgatggaacagtgggcgtcgcagaacgccaccgggctggcgatcatgctcgtctatttcctgctgtacggtgccatggttcttgtcggattcgtgctgctgatccgcaatttccgtaaagccgagttctacaccgcgccggaagagctgccgcgcggcgtgcgcgccaaaaccgtgtacggcaacgtcggcatggtcacgttcatcgtgctcacggtgctgctgacggcgatcagtctgttcctatagccgcagtcgcgcggattatgaaggccggccggggatacgttcccggtcggcctttctgttgcctgcatagcttgtgttgcgtgcgttgcgttgcgcacgccgctgccgctattcgccgctgccgaccgcgcggtgctcaagataatcggcatgcgcgatcgactgcgccaccgcatccgccatcgtggacagcagcaaatcgcttttcgcgaacgcgtaaatcgtgccgtcaatgccgtacggggtgaagccgttgagcttcaccaccggcttgtattgcgggttggcaagccccacggtcgcatgttccacggtgctgacgatgtcggccttcatacgctccacatccacgcccgccttcgcggtgaacggcaccgacaccaggcactcgttcgacgggtcaagcttctccagcgaggcggtgttcagaatggaattcggaatgaccatctcgttgccgttgcgctcgcgcacgatggtctgacgccaattgatgtccttgacggtgccggtgatgccggccaccttgacgtaatcgcccggctggatgacgcggccaagcataagcccgaagccgccgatcacattggcgatcgtatccttcaaacccagcgaaaccgcaagaccgccgatgccaagcgccgtgaacagggtggtcggattgatgccgaacaccggttgcagcagcgtgccgatggcgaacacccacaccaccacgcgcaggatgttgacgaagatggatgcgttcggcacctgcgatttgtcgagcatgcggcgcaccaccttggtgagcgccttgtcgataagcgcggcgacgatgagcacgacggcgagcaggatgagcttgctgtagtttttggcaagccagtgcatgagaatttcaactggatccatggctgcctagtctacacaggggacgttgcacaacgcttgcgattgactggatgattcctgatccgccggctggccgcagcggagcataatggattccgtaggatgcgttggccagcgaaaaggggtgcgacatgggcaatgtcgtggattatgtgcggcgcgagtttcatggattcgcggagctgccgttcggcgatgttgattcgctggtgctggctgagctctcatatatgcggctttccggcttggttccggcgttcggcgaggcgaggtcggtggcgacggtgccgattcgagagctgctgcgtgcggaaagctatgacgacatgttcgtttcgaattcctccgatatgaacgagtatcggctcgcgttgctgcgtgccgtctgcgaatcgccgcgtttccgcgcgttgcgtgtcggcgagtacgcggagcgtctgagcgagcgcgaacagcagcagttcgccgcgatgacgttcgacgtgggttgcggacccgtcgattcgctgtatgtagccttccgtggcaccgatggcacgcttgtcggatggaaggaggatttcaatatggcggtgcgttgcccggtgccgtcccaggaatccgcgtatcggtatgtgaactcgattctggacaggtcggaaggtttcctttcgtcgggcgattcgcccgcggtcatgctcggcgggcattcgaaaggcggcaatatggccgtgtatgcggccatgcgtatcgcgcacgatgacatcgaagtggctggcgagcgcgcgcggcggctcggattgctgccctcattgggtgggccagtgcggggtcgcaacagacggatctcccgcatcttttcccatgacgggccgggccttccgaaatcgacggtgcgcggtcagtcgtaccgtgcaatcgaatcgcgtatccgcaaaaccgtgcccgaatcgtccgtcgtgggcatgctgctgcaatcgaatgcgccagtgcgcatcgtcaaagcggatgccatcggcatcatgcagcatatgggaaacagctggcaagtggcggaaaatggcgatttcgaacaggtggacgagctgacggccggcgcgcagctcatcaaacgaaccctcgacgggtggcttgacaccgtaagccaggagcagcgcgagcgcgccatcgaccagatctacgggatcttcgcggcggcgggatacggcaatatcgccgatttggtggagcattggacggattcgctgccgaagattgtggaggcggcgcgcaataccgatcgggagacgcgcggactcatcagggcggtgatcaaggcgattccggtcagcgcggcgaaggcggtgcgcgagggctgaagcgggttgagtgccgaggcgggctgaagcgcgtgccgaggcggggctatgggcggatgcaacggctggtcgggatggttgccgagccgcatttcggccgattcatgtgtcacgatcctcgaaaaggcgtgaaaaatggaattgtgacacataagtgccgcgcaagtgacacacgagtgccgcacaaatgacacataagaagggcaatggagggcatcggggcgccgatgatccggatgcatccccgttcgctgacgtaggatggtgcggtgcggacgcataattgtggaagcataatggaatgcggaatgtcgacggctgcgaaaggggtgtgcaatgggcaacatcatcgattacgcgcgtacggagacgcgcgatttcggcgagcttcccttccgtgaggccgacgcgctcgtgctcgcgcagctttcgtacgacgacgtgccggaatgcgtgccgcggcttgacgacatcgaatcgcgatacggcacgttgcatgaccgtgtgaagcaattcgacccgcgccatcccatacgctccgtgcggatgctgcggaaacctccattcgacggtgtgacgatcgcgcgcgccgacgacgagctgcaccatggaagcgcggtgcccgaccataatgtcgagaacgtgggcttggttgatccgcaggtgacgcacgatttctaccatgccatcgccgcgaatccgcgtttttccggcattgaaatgggggcgtttctcgagcagttcgacggcgatgagcagacgcagttcgccgccgcgacctatcgcctgccgtccggcatgctggttgtggcgttccgcggtaccgacgattcgctcgtgggttggaaggaggacttcaacatggccttccaatacccggtgccggcacaggtgaccgccgccgactatctcgccagagtagccgcgctgtggaaggacgcgccgattgtgctcaccggccactccaagggcggcaatctggccgtgtatgcggcgatgaacgcatcggacgaggtgaaggaccgcgtcgaacgcatctactcgttggacgggccgggattccccgaatctgtggtgaacagcttcgaatatgcaagcgtgagcgaccgcatcgtcaaaatcgttccggactcgtcggtggtgggcatggtgctggaaacccccgaacggtgcatggtggtcaaatccgacgtggaaggcatcatgcagcatttcgcgttctcctggcagatgcacggcggcgaattcgacaaagtcgaggacgtggccaacagttcggtgactttcaacaaagcgttgaacaagtggctgtccaacctgtccaaggaacagcgtgaacgtgctgtggacgcgctgttcgcggtgctggaggcgtccggagccggcagcatctccgccatgatggcggccggaccgaaagtcattcccgaaatgcttggcacgtacgttgggttgagcatcgaggatcgacgcaacctgaaccaggcgctgggcatcatgctgcaggccgcgctcgcccgtaatccgaaggtgcggcgcaggtagacgcagattgcgcgggtgatgtacgtcgatgctggccgggtggctggtcggcgaacggaggcttggtttgcgtctgacgggccggcaatcgccataaatacgacacgttgtgtagtttgttctagacagactgtatagtaaaacgcgttgcgtattggaaatgactttgcgaacgactgttgaaaaagggggagtcatgccacgtccacgccgagattcggagattctgccagccaaagaacggctcgaaaacgcgttctgggaactgctttccgaacgtgagtatcgtaaaatcaccgtcaccgacatcgtgcgcacggcggacgtgaatcgcaattccttctactaccatttcacgggactgccggaacttgccgattccgccattctgcacgccgtggaaaacacaccgcttcccagcgcgcccaacgcgaatttcaatcccgacaacgaatggcgcaagcatgtcaccgcgctgctacgcgagcccgaacagcgtcggcgtcttgaccggctcgcgctgctcgccggaccgcacagctcgccggaactcgtcgaatccctgcaggacttcggcaggctcacgttgatctccgtgctggggcttgacgccgaccacctcgaccttaaaaccgatctcatgctcgacttcaccgtagggggcatgctggcggtattgcgccgttggccgaaactccacgagcagctgccgatggacgccgtgttcaacgaggacttggcggtgttggccacgggcatgttcatgtccatgtccaaaaccgacatgctgggctattggaagcgcatcttcagcagtggtttcgtgcccgggcaggcgtctcacgacgaccaagccccgcaatccgccgcacagtgagccatacgccacactgcgtgacttttcggtggtagaaacgtctgtagcggcgctctttcagggtgcgtcagacgtatgcaacagcacgacagggaggttgttccatgatcaacgaagcctacaaggccatgctcggcggcaaatccgtgatccgcgagctgagcgaatacgcgaccgcgcgtggcgccgaaatcggctacgagaacgtgttcgactattcgctgggtaacccgagcgtgccgtgcccgcaggactataccgacgccgtgatcgacatgtataaaacggccgaaccggtggcgttgcacggctattctccgtccttgggcattccgtcggtgcgcaaggcgatcgccgaaagtctcaaccgccgcttcgacatggactacaccgccgactacatcttcccgaccacgggcgcggccggcgcgttggcgcatgcgctgcgcgtggtgaccaagccgggcgacgaagtgatcaccttcgccccgtacttcccggaataccagccgtacgtgaacggcaccggcgcgcacctgaccgtcgttccggccgacaccgagaacttccagatcaacttcgacgcgttcgagaaggcgctgaaccccggaaccgcggcggtgctcatcaacaccccgaacaatccgtccggcgcggtctattccgctgaaacgctgacccgcctggccgaggtgctcaacgccaagcagactgaatacggccacgacatcttcctgatcgccgacgagccgtaccgcgagatcgtgttcgacggcggcgagcagccgtatccgagcaaattctacgacaacacgctttcgtgctactcgtactccaagtcgctgtcactgccgggcgagcgcatcggctatgtggcggtgaatccgcgtgccaccgacgccaagctcatcgtgccgatgtgcggccagatcagccgtggcaccggccacaactgcccgtcctccaccgcgcagctggccgtggccaaggtggtggacgagacgagcgacctgtccgtctacgaaaccaacatgaacctgctgtatgacgcgctgacccgtctgggcttcgacgtggtgcgccccggcggcacgttctacatcttcccgaaggcgcttgaggaggatgcgaacgcgttctgcatgaaggccaaggattacgacctgattctcgtgccgtccgacagcttcggcgtgcccggctacttccgcatggcctactgcatcgacacggagaaggtggagcgttccatcgcggcgcttgagaaattcgtgcacgaggtgtacggccgctgagccgctcgcgtatttcgcctatattccgcttatagatggcggattcgctctcgtgcctgatgccatctcgcttatggatggcggatgatgcggggaaaagccggttggagggtatggatattgccccctaaccggctttttgctgtagggccccgccatctataagcgagataccgcggggcgatttggaaaatccgccatctataagcgagatagtgcaggattgtggggcggcaagccgactgtctgacgggaccgtgtgcgttgatacaggttcgcccggagctggtggggtccagctccgggcgaagtctgttatggggaaggaaggaatctgaatcggttaatgcgtgaatccgtcagtgggtggcgatctcgtcgatcttggtgacgtggccgccgaactgggcgcgcatggtggacacgacgcgcaggatgtcgtcggcgccgccgcgcgaggtctgacgtgcgtacagtgcggccgcggtggccggggtcggcacgccgagttcgagagccgcctcgatcatccacttcgcctcgccggactcgttggcgaccggcggcatggacttgagcgtcgggtcggacttgaaggcgatggccagcaggtcgagcagccaggactgcaccacggaaccgtccctccaggagctcatcacggccgccggatcatcaacgagatcggacttcaccatggtggcgaagccttcgccgaaggcctgcatcatgccgtattcgatgccgttgtgcaccatcttggcgaagtggccgccgcccaccgggccggccagcaccagtccggaatcgccttccggcttaagtgcctcgaaaatcggacgtgcggtttcgaaatcgtccttgtttccgccgaccatgagcgcgtagccgcggtcgatgccccacacgccgccggagacgccgcaatccatgaaatggatgcccttcggctccagttcggccgcgtggcgtgcgtcgtcggtgtaacgggagttgccgccgtcgatgatcatatcgcccggctgaagaagctcggcaagctcgttgatggtgctgtcggtcgcttcaccggccggcaccatgacccacaccagacgcggggccttcagcgcggccaccagttccttcaggcttgccacggtgcggtccgactcgggggagcggtcgtagccgaccacctcatgctccgccgccgcgatgcgcttcgccatgttgccgcccatacgtcccaggccgatcattcccaactgcatgatgtgcttctttctctaaaaatggttgaaaagtttttgcgattttgaataaggattgatgctgcccgttggcttcccgcgccttccgcaacgcagaaaagaaggttgcggcaagctttgcgggcggcaagttttggttatgttttgggttatgtgagtgtggttgcgattgctgcgttcagtgcgtcaaagcaccagtgagagcagcatcacgcagcccaggccgaccaccgacagaatggtttccatcagcgaccaggtcttcagcgtctggcccacgctcatgccgaagtattccttgaccagccagaagccggcgtcgttgaggtgggagaagaacacggagcctgcgccgatggccagcaccagcagtgccagatgggtcgggctcatgccggcggcgagcggcaccatgatgccggaggcggtgacggtcgccacggttgccgaaccggtggcgagacggatgagcacggccaccagccagcctgcgatcagcgggttcatggcggattcggtgatggagttggcgatcacgtcgccgatgccggagtcgaccagcgtctgcttgaagccgccgcctgcggcgacgatcaggatgatgccggccacggagccgaaggactgtccgaccatgccgttgacggcgtcacgggagaacttctgcatgtagccaagggcgaccatggcgaagacggtggtgatgagcagtgccacgagcggggtgccgaggaacgcgatcatacggccccaggcggtggtgttctgaccggtcagatccacgatggacgcggcgagcatcagcacgaccggcagcaggatcacggacagggcggtgccgaaggacgggcgattctccgcggacttcggagcttcggcctcagcctcgttctccggagctgcgatcggaacccacttggcggcgagcctgccgaacagcgggccggagatgatgacggtcgggatggccacgatcaggccgagggccagggtgatgccgaggttcgcgttcagcgcgccgatggcggtcagcggaccggggtgcggcggcacgaaggcgtgcagcgtggacaggccggcgagggccgggatgccgagcagcaccacaggggacttggaacgacgggcggcgaacagcaccaccgggatgaggatgaccacgccgacctcgaagaacatcgggatgcccacgatgaacgcgatcagtgccatggcccacggcagacgctgcaacggtgtcttggccatgatggtgtcgacgatggtgtccgcaccgcccgacttgaacaggatggtgccgatgatcgagccgaacgcgataagcaggcccacgttggaaatcgtgccgccgacgccggaagtgaagctatcgaacgccttgtcgaacggcacgcccgcgcacacggccatgacgaatgagccggcgagcagggacaggaacggatgcaccttgcatgccgcgatgagaagaacgatgacggcgatgccgatgatcgccgctgcgatgagattcatgaatcctccttgactcgttgaatttctctttcgatttttagttatgtgcgattattttgcgctgtgttgcggcttgcgccgttcactcggcttgctgcgattgcgaggccaccttcgccgcgtactcgttcactgcggcgacggcacgttcgaccatttcctcgacgctgccttcgatggagacttccacgccgttctcgtctggctggagcggctcaagaatggcgaactggctcggcagcagtgccggcggcatgaagtggcccttgcgctcgttgagacgctgctggatgagttcctgcgagccggtcagatgcacgaagaaggtgggaacgttctgggcgagcacctcacggtagctgcgcttcagggcggagctggagaccacggtgttctcgtccagcgcctcgcgagccaccatccaggtgttgatgaccttgagccacggccaacggtcctcgtctgtcagcggaatgcctgcgctcatcttgtcgatgttggcctgcggatggaagtcgtcgccctccgcgtacacgtatccgagacgttcgtgaatggcttctgccacggtggatttgccgcatcctgcaacacccatcaccactacgtgaatgctcatgttgtcctccttgaactctgctgtattgccagtgccacttcgcatcggcgatgacatcaatatagctatgaaaggtagtactagtcaagttaaaagtactacgaataaaaataatcatgcgacttgctatgctgtaggtagtacaaatcggcggcaaatcgcgcgaatcgtgcgggggtaattattcggacgtcacgcgaacggcaatcgtatacggcgtgtcgcaaaaacctgaaaaaagatttgcacgcacaacgagaggaattgtggatggcaggaaacgaaaacggcggcgaactgctgcaggatgcagtgtgccgcacgctggccatcgaaatgctggacggcaaatggccggccggtgaaagcctgacgttggaagacgtgcagaaccgtttcggcatctcccgtaccgtggcgcgcgaagtcgccaaaacgttggaatccatgggtgcggtgacggtgcgccgacgcgtcggattggtggcgcggccgttctccgactggcaggcgctcaaccatcaggtcatcgaatggcggctccactccacgcagcgcgagcggcagctgtcgtcattgaccgaattgcgattggcggtcgaaccggctgcggcggcctcggcggcacgcctcgcctccatcgacgtcaaggcgaaattccccgtctacgcggcgcagatgcgccaaatcgccgaatcaaacgaagagggggctgtcggcctgaccaaattccacgatctggacgtggaattccatactttgatactgcgcgaaagcggcaacgaactgttcgccgcgcttgccgacaccatcgccaccgtgctgcgcggccgtgtggaactcggcaaatacccgatgaagccgaagccggccgcgctcgacgcgcacgatgcggtcgccgacgcgatagcgaagggcgatccggaacgtgcgcgtaaggccatgttcgacatcgtcgacgaagtggcccgcgcgctcaacttcttctaaaaccagtcgctaccggcgtcgaaccgccggattcgcggctcaaatcacaggttcgcgtcggccgtctgacgcaggtcgtcaacgatttcgcccaaagtctcgctgaacaccgcctgatcggcgtacatcgaatcgaacagcgtatcgatgtttttgcggaaatccttcggcagaatggcacagtcgcgttcggcgagcttgtcgagacgcttctcgccgggatgcgtgcggcggttcagcgcgaatagcacatcgaaatacgattccatgaacgcggccatgcgatggttgaccgcgattttgtcgcctcggctcgcggccttgcggatctgtgcgtcgtacgacggcaggttgccggtaagtagacgcatgttgcgattgatgatgttgcggcgcagttcctcggggaacggcacgtcgaaccgctgtcgggtcgcggcgtactggccgtcgcggtcgaacagcaccttgctggtgagcatgttgtgccacatgcatgtcgtatagccgttgctggcctgaaaccgttccaccacgtcggcgacattggctgcgaactggtccagatcgcggtacagcacgtcgatattggtgccgtcgttcagcgtgcagtcgtcttcggtctcccaaaaatcgttgtcgatttccatatggctgcaatagttgcgcagcagcctgcggcggcgttcggcagacacgggtgcggtgacgtacacgtagacgtcgtaatcggatttttcatcgttatcgccggtggcgcgtgacccacccaacgtgatggcctcgacttccggccatgcggacactgcttcgactagttcatttgccaatgacatcgtttacctctctctgcgtcattgctggagcggcgctacgttgcgccacggtgtgcaaacgatgccagtataacataccagatggtaactgtcgaagttgtgccggcctacgcggtttcccgcaggccggcacagcgcattccgccgaacgacgattgtcaggcggaatgctatcgagcgattgctgtcgagcggaacgctgtcggacggcagctgtcagtcgacggttgcggcttccgtcgaacccttggtcggatccttctgcagaagcaggaagacgagcgcgacggccagcagaatggctatcgacagcacgccgatcgacgcgttgccagtcagcgacgtcgtggtggcgacgaggaacgtgccgatgatcgaggcggtcttgccgaaaatatcgtagaagccgtagtactcgttggcatggtccttcggaatgatcttgccgtaatacgagcgggacagcgcctggatgccaccttggaacatgccgaccagaatcgccagaatccagaattcaagtgcggcgcgcaggaagaacgcggcgaagaagacgatgcacatgtacgccaccacggccgcggtgatcatggttttcgagccgaaccggcctgccagcttgccgtagatgatggagcaggggaacgccacgaactgcgtgacgagcagcgccacgaccagctgcgtggagtcgatgcccagctgcgtgccatacgacgtgctcatggaaatgacggtgttgacggcgtcgatgtagaagaagaacgcgatcatgaacatccacagcggcttgttcttgcggatggcgcggaacgtggagccgagctcggcgaacgtgccgcggatggcctcgcctgcctgccccgcggtggcgcggtaatgcacctgcttatagctggtgagcagcggaatggtgaacgccacccaccacagcgcggtgatgacgaacgaggcgcgcgtgcaggctgtggtcgaccagccgaacagcgcggggcctccgaaaatcagcgcgatgcagacgatgaacggcacggtcgaaccgatatagccccatgcgtagccgtgtgaggaaatgcggtccatccgttcgttcgaagtcgtgtccaccagcatggagtcgtagaacgtaagcgaaccattaaggccgatggtggccagcacgtacacgatgaggaacgcgagccaaccaagcggcatcgccatcgcgcagcacatgaccacgcccgtcaggaagaagccggtgaagaagcggatcttcatgccctgcacgtcggcgatggagccgagcagcggcataagcacggcgatgacgagcgatgcgatggtctgcgcgtagccccacgtcgacacgatgttcgtctcgccggccgccttgagcagcgaattcgcgtagatcggcacgacggcggtggacagcagcacgaacgcggaattgccgacgtcgtagacgatccacttcttctcgcgtggcgtcatcatatgcttggattgctggctggattgctgcggctgctgggcctgcgcgttctgctgggacggttgggtctgcggctcggctgtgtcggtcaatgttgactcttttcggctaaatgtcaatcttatggctcatcttattccattacttcatcgtacgggcgtggcgggtggtagcagaccattcgacatgaacagcgcatgaacaagcatgttctgcccgtacgggccgcatacgcgtgctgtcgagacatggcaaaaacggcggaatatggggaatgcaagccgattttcgtccacaagtttgcgattggccggggctggttgtatagttgagaagttgtgtgttctgccatgcacttcgttgtgtggtgtcgaacgcgcagacttgcaagtcaatagtaattatagggagtccattatggcagctcgttgcgcagtgtgcggcaagggaccgcagaccggtttcaccgtttcgcactcacatattcgcaataagcgcaccttccgcccgaacctgcagccggttcgcaccaccatcgacggcgagaacgttcgcgttcgcgtttgcgtgaagtgcatcaaggctggcaaggtccagcgcgttgaagcgtgaatcgcgaaataacagcttgaaaccccggtaagccgaatggccgccggggttttgctttatctggccgtccacaagccgtgttgcggcgaatggcgccgccacgaataatggggaattcagcccgccgcacaatcatccggtcgtgccacaatggagtgttatgagcaccacatggcaaaccccgatttcctcgttcgaaacgaaccgccgcagagtcggcgcgctgaaatcgctgggcgtggtgtccgtgggcgacgcgctgacctactatccgttccgcgtcaccgagccggtgccggcacgcgccctgcgcgaagcgaaaatcggggagaagatggccttcgccgcgcacgtgcgtggcgtgcgcgtctttccgatggcccgtcgcggattccggctgatcgccgacgtcgatgacggcgatttcgcacgcagccggcacatggacgcttccatggcgtctctcgtgttcttctcctatcgcaagtcgtacgtcgattggatccagcgcaaactgcacgaaggcgcgttgctggtggtcgcgggcgagccaagcgtatacaacgaccgtctgcaattcacccatcccgacatactgacggtcgatccagccggcgagcaattgcgcagccgctcatctgaggaagccgccgaatgggatgacggcttcggcacggaacaaccggcggcagtcccgcaatcgccgaccatgccgaatctcaaatacgatgcggcttccgtaccggaggcgatgcgccacgtatgccgcccacgtcccgtctaccacgcgaactcgcgcatctccagcgaacacatccacgagtcgatcgaaaaatgcatggaccggctgtgcggtgacgaatacgctgcggcacaggcagcccgtgcattgcatggcgccgatgccagcgacgcgcaacatggggaattcgacgcgccgcaagtcgaccggcaggcacggacggaagcgcttgccgccgccattcccgacatcatgccggaagcgtttcgtatggaacatgggctgatgcaccgagccgaagcgttcatggcgattcacgatccgcaaaaccgcgacggtttcaacaaggcgttgcgtacactgcgctacgaggaagcgctcatctgccaaaccgcgctggtgcagtctcgtgattcgtcgcgtaaggccatggccacagcctgcgccgacacgcggctgaaagacgatttcgtcgagtcgctgccgttctcgctgacggacgggcaacagcaggtgatcgccgatatttccgacgatatggcacgtgattaccccatgcaacgcctgctgcagggcgaggtcggctccggcaaaaccgtggtcgcggtggcggctatgatgcaggccgtcggctccggcaaacaagcggtgctcgtcgcgccgacgcaagtgttggcggaacaacattacagcagcatccgcggcatggtggatcggatgtgtggtaccggcgaagaggctgacgaaaacgcgaaatcaggggaatcgcagacaaaatcaacgcaccatgcggttgtggatgaaagtggacaagtcacgtcgggaaacgcgccggaaccgcaaaacggtggacaatcggatggcggccaggtggagaaactgctggacggccaatcgaacagcctgccggacattcccgtgctgctgctcaccggcggcatgaaactcgccgcccgccgacgcgtcctcgcgcaagcggcctccggcaaaccatgcatcgtggtggccacgcacgccgcgttctccaaaaccttccaagcgcccaacctcgcgctggcggtcatcgacgaacagcaccgtttcggcgtggaacagcgcgaatcgctgaacgccaaaggctccacggcaccgcatctgctggtcatgacggccacgccgattccgcgcaccgcggccatgacctggttcggcgacctcggcatctcctggctcaccgaactgcccggcggccgcaagccgatctgcacattcgtcgtgcccgaagcgaacggcccgctgatggcggaaatgttcggtctgattcgcaagcgtatcgacgcgggggaacgtgcctacgtggtctgcccgcgcatcgacgccgacgcgaaggatgccgacgatgcgggcagttcaggcgatgcggaagtcggttccgcattcgacgccacatacgatttgggcgaggatgacgaacagcgcgaacagcggccgccgttgcattccgtcgcggaaatcgcggaacgcttgcgatcgctgccgcaattcgctggcatccgtatcgccacgctgaccggccgcgacgatgacgaaacgaaatcgcagattatggccgatttcgaagcgggcgtgacgccgattctggtggccaccaccgtcatcgaagtgggcgtggacgtggcgcaggccagctgcatggtgattttcgatgccgaccggtatggcctgtcccagttgcaccagctgcgtggacgcgtgggccgtggaggcaccgaatcgggcgcgttccttatttcacgtgcgccggaaggcagcgatgcggccaaacgccttgacgtgattgccggcacgttggacggcgccgaaatcgcacaggccgaccttgaattccgcggcgcgggcgacgtgctgggcgacgcgcaatccggcggcaaatccggactgaaactgctgcgcgtggtcaaagacgtgaagatcatcgaggaagccagagcggaagccgcgaaactggtggccgaagaccccacgttgcgagggtacgtgcagcttgccggcgcggtgctcgacttcacgcgcggcaacgagacgttcctgaccagcaactaggctcgatagctatgcgcgtaatttcaggacgattcaaaggcatggcgttgaccacgccgaagccgggcaccaggccaaccaccgaccgcaccaaggaagcgatattctcgcacctcgattcgtggggcgtgctggacgacgcgcgcgtgctcgacctgttcgccggaaccggcgcgttgggcgtcgaggcgttgagccgtggcgcgcgcgaactggttgcggtggaatcggccgctccggccgcggcgctgatcgcaaagacgttgacggcgttgaagcacaaccgttcctgggagccgggcatgagcgcccgcgtggtcaaggcgcgtgcggaaaagtacgcggcggccgcatcggcggtcgcgccgttcgacgtgatcttcatcgacccgccgtacgcgttcgaaaccgaggcgtgcaaccagctgctggccgatttggcgggccgtgagtccggcgaactgactggcgagggcacggtgatcgtgctggaacgctccactcgttccgacgagccgaccgcgcccgaaggctgggatatcaccgaccggcgtgattacggcgaaaccgccgtgtattacatcgaacctgccgaatccgccgatccggcagagccggttgaatccgcggactgacgtccgggcttcccaactaaaaacgtcgacggtggacatacgtgccctccgtcgacgtgaacaatcgtgcataatcagcgctgccgtgggtgcgcgccggaaacctcccagcccaacgccatcagcgttttgcgatcggccttgtcaagcttggaacaatccaacgcctcgatgagatccggacgcagctcgttggtcttcgccagcgcctcatcgcggcggaaacggtcgaccttcgcgtggtcgccggacaacaggacgtccggaaccttgataccgcgccaatcggcaggcttcgtatactggcggtgctccagcagggcgttctctcccgtatacgattcctccacgatcgaggccgcattgcccatgaaaccgggcagcagacgggtgatggcctccaacatgaccgacacggccacctcgccgccgttcagcacataatcgccgatcgaatattcacgcacgtcgacgccctgcgcacggtaatactgcggaatacgcgcgtcgtagccttcgtaacggccgcagccgaacagcagatggttggcgtggctcagctccgtcgcgtcctgctgggtgaacaggggagcggacggattcgggaaaatcagcaccggacggtcggtcgccggaacggtatcggcatttgcggcgatttctgtcgccgattccgccgattcggccgtgtccgcggaagccgtgtcgtctgcgtctgccgtggaatcgcaagtaaccgtggtcggctcaagatgcagcagttcgtcgaggcattcgctccacacttccggcttcatcaccatgcccgcgccgccgccgacgggagtatcatccacggaatggtgcacgtcgtgcgtccagtcgcgcaggttgtgcgcggtgacttcgaccaggcccttctcctgcgccttgccgagcaggctcaggttgagcacttcgaaatattccgggaatacggacacgatatcgatcttcataatgttccacaataccggtacgcctgccaagcgcggcgcgtacgaaaaaggcgccggcataatcgccagcgccttgttggaaaagcagcggatcagagccccggaatgagtccgcccggcgggtcgagggtcagatatccgccctcgaggtcgatgtccggcacgagctcgtccacgaacggcacgagcgcgctgttctcgaccaccacgccatcggcgtccttgacgggattggccagacggatcttgagcagccactgggccacttcaatcacatccaccaccttgcctaccacagtgccgggcgcaagccccagcgtattgccctcggcaaggcgcgcctcaagactgatcaggtccttcggataccactcgtctgcttcaagcatctcctccggatcgtccgcttcgccatacagcaccacgccattggcggcttcggacgcatcacggtcgtcgatgccttcgaatttgatgatccaacggtttttgaaggtacgggagctttccaccacgtactcttcctcgccgtccttcgtatacaacacagcaccgggagcgaaccggtattccggttcgtccgtaaagatctgcacggtgacctcgcccttgagcccctgcgcacgcccgatacgacagaccctcagcagctcaagctgttgagggtcgtcggaatgcatatcacgcaccacgctaggatctcacctgcgcacgtccatgatgtcgacgcgcaccttgtggtcggacagtgcctgcaccacggtgcgaatcgcatttgccgtgcgtccgctgcgtccaatgacgcgaccgatatcctcagggttcacgcgcacgcgaatgagttcaccgcgcggattctcatgggacttcaccgagacatcatcgggaaaatcgacgatgttcttgatcagatgttccacagcctgggcgagcatgatcactcggcttccgcagccggctcttcagccggagcttcctcggtggcggcggcttcggcctcagccttggccttggcgtcagcttcggacttggcggccttcagcttctgggcctgggcttcgacagcctcgacgcgagcggcggcatccgggccagcctcaacggtcttcagggtgccttcagcaccgtcaagacccttgaacttctgccagtcaccggtgatcttcagcaggttcagcacctgctcggtcggctgagcgccaacaccgagccagtactgagcacgctcagagttgatgttgatggttgaaggctgggtgttcgggttgtaggtaccgatctcttcgatggcgcggccatcacgcttggtacgggaatccatgatcaccacgcggtagaacgcgtagaacttcttacccatgcgcttcagacgaatcttggttgccaaaatggctctccttgtaactaggggtgtgtgtttcgtgttctgtgtggggcacggaatccgaaacccacgtgttcctcacgtcacgcgattggtagagggcctcgcgcgcgcgaataactgagcaattataaccgtgaggtatggacgcgttcccgtatgcgttcccgagcgtccgtttctgttgactcggacgctcggcttgcgttttgcgcattctgaatggccgtttctccagaatcggacattggtgaggtgttgtggcggtctcgggcgtccgaatcacccgaatcggacgaactcgctatgctggatatgttcattggcggttttcgtgcgcctgattatggccatttcaaggggatttgcatgagtgttgcgttgtggatcgtactgctggtatgcgtgttgtggatcgctctgagcgaaatgccggccggttgggacggccacttgccgttgccgtatctgattgcgctgacaccgctgttgtggattccaacattggcgattgcgattgccggtgccgtacggcatgacaccgccctcgccatcgtcgcggcgatcgcgtgcatcgcttcgctgctgcgcaaaatcgcgtattggaacaacaatctcacgtccatcaacacggcgcagatggtggccgacaacatcgcaaaaaagcgtgaaacatcctgtggaacacatacgtcgactgccgcggaagctgcgaaacacggccgtttccgcgtgatgacgctcaactgccggtacggtcgtgccaatgcggccgcaatcgtcagcgccgtcaaggaacacgacgtcgccgtgctcgcgctgcaggaattgacggacgatctggtcgcggccttggacgaggccggcctgtccgacctgctgccgtaccgccagttaggggagaacaaagatacggacaacggcggcttcaacggtatttggattcgcatcgagccaagcgacacgtcgccgatcaccgccgtgattcccgccgccgacgtgcctggcgtgtgcttcccgattgatgcgatgcgcggcatcactttcgtttccgcccatccgaaatcgccgatgcgcggctgccgcgactggtccgccggcatcatcggcttgggtgagctggccacatcgcagaagcagggcgatatcaccgtcgtattgggcgacctcaactccggtaccgaccatccgagcttccgcaagctgcttgacgccggcttccaggacgccgcgttgaccgaggcgaagggccgccgcgccacgttcccatcgtggctgccgtggccacgtctcatcctcgaccacatcctgttcaccgccggtctgaccgcatccgacgtgcgctccttcacggtcaacggtaccgatcatcttgctctggccgccacgctgacgttgaaataagccgaaaataagctggcataacgaaactgccgacgctggaaaacgttccaacgtcggcagtttcgttatatatgccgtattgcgattgccggttgtcgtaatcgccggcaatcgcacatatcgcggcttagtgcagcagacgcttagtgcagcagacgcttagtgcagcagaccggacagaccgccacctaagttcggcggcagctcgccggaatcgcccagcatatcctgcaatccggcaggaagcgccggattctgtggcttcttggcgaacgcggagccacctgacgaagcgccgccggaagccttgccggcgagcttgtcgcgcaatgccttctcctcggcttcacgcttcatcggattgccggacttgcccgacttcttcttgttcttcttgcctttgcccttgcctttgccgccgcccatcgcggggcctccgaagccgggcacgccggcgccgaccttgttgctcatgcggcgcatcatcttcgcggcctggtcgaagcgctgcagcagcgcgttgacctgcgaaaccgtcacgccggaaccgtaggcgatgcgggcgcggcgggaaccgtcgatgatcgagggatcgcgacgctcgtccggagtcatcgaacggatgatggcctcggtgcggtcgatttccctctcgtcgaactgctcaagttccttacgatgcgcggccatgcccggaatcatgccaagcaggttcttcatcgggccgagtttgcgcacctgctgaagttggtcgaggaaatcgtcaaggccgaaggagccgtcggagatcttgacggcggccttgcgggcctcctcctcgtcgaactgcttctgcgcctgctcgatcagggtgaggatgtcgcccatgtcgaggatgcgggacgccatacgatccgggtggaagacctcgaaatccttcaatccctcgccggtggaggcgaacaggatcggcttgccggtcacggatgccacggacagcgcggcgccaccacgggcgtcgccatcgagcttggacagcaccacgccggtgaaatccacgccctcgtcgaacgccttggccgtctgcacggcatcctggccgatcatcgcgtcgatgacgaacagaatctcgttcggctgcacggcatcgcggatgtcgcgagcctgcttcatcagctcctcatccacgccgagacggcctgcggtatcgatgatcaccgtgtcgtaaagcttctgcttggcgagctccacggcgtcacgggccaccttcaccgggtcgccggtggtctggccgggggagacgaccgcttcgccgccatcggactgcacgcccttctccggtgcgtacaccggaacgccggcgcgttcgccaaccacctgcagctgcgtcaccgcgttcggacgctgcaaatcggccgcaacaagcagcggagtgtggccggaatccttcagccagtaacccagcttgccggcgagcgtcgtcttaccggcgccctgaaggccggcgagcatgatgatcgtcggcggattctttgcgaagttcaacgggcggtccacaccggcgccaagcaccgcggtgagctcctcattgacaatcttcacgacctgctgggccgggttgagcgcttcggaaacctcggtgccgagcgcgcgttcgcggatacggccggtgaaggaacgcaccacgtcgagcgccacatcggcgtcgagcagcgcgcggcggatctcgcggatggtgccgtcgatatcagcctcggaaagcttgcctttgctcttcagatgcttgaacgcatttgagagccggtctgtcaaagaactaaatgctgccataatgttcctcagtctagcgtttcgcgcggatagcggatgaaatgggtgcgattgcctacttcagcgaccaagtggagccttgcggaccgtcctcgatggcgatgccggccgcgcccagcgcgtcacggatcgcgtcggcacgtgcgaaatccttggccttgcgggcttcggcacgttccgcaagctgttcggaaaccagcttgtcgagcgcgtcatgctcggcggaatcggctccggcaccagccgcaccacctgcggcaccgtcggaaacccacggctccgccagcggatccaagcccaacgtgtcgagcatcgcacgcacgttcaccagcgcctcgcgaacctcggccttcgccacgtccgaatcggcgcggtcggccagcttcgacagcaacgtgttgccggaacggatcgccgtgaaaatcgcggcggaagcgcccgaaacgttgatgtcgtcgttcatcgcggcaacgaaatcggcgggaagcgcgtcggcggaaatcgccataatctcttctcgtgacggctgttcgccgacggcagcgcccgcgcgctcgatgaagttcgccacgcggtcgtacgcggactgcgcctcggcaagcgtctggtcggaccattccagcatggaacggtactgcacggaaccgagggcgtaacgcaccacccaagcggaatgctcggccagcaccgccggcacggacaggccgttgccgagcgacttcgacatcttctcgcccttcgcggtgacccaggcggaatgcatccagcgcgcggccgaatcgtaaccggcggcgcgcgtctgcgccatctcgttctcgtggtgcgggaatcgcagatcaagaccgccgccgtgaatgtcgaacatgtccttcagatagcggtggctcatcgcggagcattcgatatgccagcccggacggcccgtgccgaatggggtattccagcgcgcgtcgagcggatcggaatccttcggtgccttccacagcgcgaaatcgcgcggatcatgcttgtcgggggacatgtcggcagggtcgaccggattgtacttgtcgttgcccgcgttgtccacggacgggcccatcgcgtcggtcacttcggaagccgcgtcggaaaccgcggtctgcttctggtgcgtcagctcgccgtaatgcggccagctcgccacgtcgaagtagacgttgccggtcgggttgccgtccgcgtcacgcaccacataagcgtggccgttgtcgatgatcttcttgatgaggtcgatcatgtcgatcatgtggccggtggcgcgcggctcgtacgtcggcggctccacgccaagcttgctgtacgcctcggtgaactcgcgttcgtagatatacgcgcgctcccaccactgctggcccgcggcggcggccttgtcgaggatcttgtcgtcgatgtcggtgacattgcgcacgaacgtcacattgtagcccagtcgctcgaaccagcggcgcaccacgtcgaacgcgacggcggcgcggatgtggccgatatgcggtgagctttgcacggtggcgccacacacgtagataccgacctgacctggtttgatcggcgtgaaggatgacacggcgtgcgatgcggtgtcgtacagcttcagtcccgcggcggccttcgccaccgcaagagcgccggaagtgttggtattctgcggttcttgcgtgtttgtcatagtcatgagaatattgccagaatcggacatggccggcgttgcgtccgtaagttgttggcaagcacaatccgcatgtttgttcgcaggttcgccggtgcttccacacgcgggtttacgaacatattcgcgccgatcgaatcgaaatttgtggacgaaatgtgtttgccgtttacgtaggtgatgtaacaatggttgtatgacgcaatcgaaagtgctgattcttcaacatgtcccgtgggagaaaccggggcgcattttggatagcttggacgacttgggtatgtcgtacgaaatcgcgaacgtcgcgaaggaaaagaagccggatctgcctgatttcaaagagatttccggcgtggtgatcatgggcgggccgatgggcgcgctcgacttcgacaaatatccgggactcaaagcggaaggcaagctcgcacgggcggcagtcagcgtcggcaagccggtactgggcgtgtgcctgggccatcagatcatcgccaccgcgctgggcgcgaagctcaaaagcggcgatgcgccggaaatcgggttcgcgccgatcaagcgcatcgacaagcacgacttcttctccatgtggaacaagacgcttgacgtgctgcattggcataacgacgtggtgacgctgccggaaggtgcgacgccgctggcgcgcagcgagaagaccaagaaccaggcgttccgtttcggttcggcattgggattgcagttccacttggaggtcacccccacgttgttggacgagtggctggacgagccgtgcatggtgaaggatttgaaggccgccggcggttcgaaatcgcagctacgtgacgccttcgccgaatacaatccgcagctgcagccgatggccgatcaggttttctccggattcgcggcccggtgcagcacctatgccgcaacgctggagcgctgataagcgttctgcccgctacacgccccactgaatcgccagctgagtgccttccgtaggtggttcctgagttccgtaggtggttgggtgatggaccagtgtttcggaaaggctgaatttaaggcttttcttcgtgcggtatccgaagacaaccacctacggaagcggaaaaccacctacggaatcttctagggcgttttcgttgcctacattccaaggtctcctgtctacgtttcgcatcatgcagctggtgagcaagccccaaatacgtgtgcgggaggcggtgttccgccgacgcgctacattggtgagttatgccgacttatgatttgggacttgaacacgtttcgctcgctttcgcgaccaagaatattttcaccgatgtgacgcagggtgttttcgagggcgaccgcatcggcatcgtcggcaagaacggcgacggcaaatccacgctgctgcacctgttcaaaggcacgcaggaaccggattccgggcgcgtgaccatgcgcaacggactgacattcggcatgcttgaccagcgtgacccgcttgatgacaatgccaccgtgcgtgaggccgcgctcgaagggcgcgaggactacgagtgggcggccgagaccagatcgcgcgaaatcgtggaggcgctgctcggcggcatcagtctggacgcgaagattggttccctgtccggcggacagcgccgccgcgccgacttggcacgcctgctgctcaaggattgggacattctcgcgctcgacgagcccaccaaccacttggacgtggtgacgatccactggctcgccgaacatttgaagaaccgttggccgtccggtcagggcgcgctgctgctcgtcacccacgaccgctggttcctcgatgaggtctgcgagtcgatgtgggaggttcacgacggtgtgatcgatccgttcgagggtggttactccgcctacatgttgcagcgcgtggaacgcgaccgtcaggccgatgtgcgcgaaaccaagcgccgcaacctggcgcgcaaggagcttgcctggctgacccgtggcgcccgcgcccgttccaccaagcagaagttccacgtcaaggcggcgcgtgagctcatcgccgacgtgccgccggtgcgcaacaccttggaactgaaacaaatggccacctcacgcttgggcaagcaggtggtcgatctgatcgatgtgacgcagatcttcgaacacgcgcagggcgaggccgatatcgaccccgatgtggcggagatggaggcatcggcttcccgcgtggacgtggtgccggccatgtatgccgagccgcaggcgcacggttccatcgaggtggccgtcgacgatctgaccgatccgcgactggtggacgccggcgtgcccgaggcgcgccaagctgccgagcaagccgcgcggcaggccgaggaacagacgcaggagtcgggcgccgacgccgacgatgccgctcccgaagtcacgtccgcggcgcggaaggtcaccgtgaccggccgtaagatcctcgacgacgtgacgtggctgatcggcccgggcgatcgctttggcatcgtcggcgcgaacggtgccggcaaatcgaccctgctgaagatcctcgacggcacgatcaccccgaccgccggccatgtgaacatcggcaagaccgtgaagttcgcggtgctttcgcagcgcctcgacgagctggagaagctcggcaaatacaagatcaaggaagtgctgagccgctacaagccgagctacatcgtggacggcaaggagaccacgccggggcagatgatggaacgcctcggcttcgaatccgcacagctcatgacaccgatcaaggacctgtcaggcgggcagaagcgccgcatgcagctgctgctcatcctgctcgacgagccgaacgtgctcatcatggacgagccgggcaacgacctcgacaccgacatgctcgccgtgatggaggatctgctcgacacttggccgggcacgctgatcgtcgtctcccacgaccgctacctgctcgaacgcgtcaccgaccagcagttcgcgctgatcggcggcaagatccgccatctgcccggcggcgtgcaggattatctcgacatgaccgaggccatcaagaacggcaaggatccgtttgcggatgagaatgccgggaaagctggcaagggacggaagaatagtgatgccggcgatcccgctacgaccgcgccttccgtaggtggcgcagcttcctcaccttccactggcgattcgtcgtcggcttccacgccgaagctcaccggcaaggcgttccacgacgcgtcgaagcgcgtttccgccatcgagcgcaagctggccaagctggaggagcagaaggccgatttggaagcgcagatggccgcgcacgacccaagcgattacgaggggctgggcaagctcaacgagcagttgcagtccgtcacggacgagtctgaatccctcgaaatggaatggatggagctctccgaacagctcgagtagtcccagtcgggcaaactgatggtgagaggcttgtaggcgtcggtttggcggtacggaatgtgcaaaaccgacgctggcgattcgctcagcgtcggtttaccggaataattcgtcgtggctgccggtgcgttcgaagaatgcgactgaatcgttcgatgaccagatcactagccagtccccggcattggcgacatggcattcgtatcgcccgcgccaattgccggacagggtgtgcatgttgtggcggcggcgcagctcctccagcgtttccggggtgttctccactaccagatcgatgactttttcaagctcggtcaggttccagttacgccgtttggcgttctttttcagatcgcggctgaaggccttcgcgaagtcggcggtcaaccggcccatcagcgcatcgccgcttcgagcaggtcgtgtccgttggtaaaacgccccgtcttgcccgatgccatgaagctgtccgcttcggcagcggcgttcaggctttcgccattaggctcctcgggggcgaacgtcaatgggatgcgcccggtattcaccatttgcttgaatacggcgcgcaccactgacgagagatccaagccataatattcggccacgtcggcggccgaacgcttgagttcgtcatccatccgtatggtcaacgttgatgcactcatcagaaacctcatccacttgtatgtacaaaagctagatattgcacgtacattttatcaggaaagtgatttcatccaaggctgacagttggttagcggcattgcgagccagtttcctagcgaaggcaatcgtcgaacagcgtttgtgctatttccaatacgctggcaatactgaatccggaaggttcatgtgagactttcacggcgttggttgcctggtcgatggcgtatcctccacgaggtacgtgccggaatgtgccgaacgtgcaaggcgccacgcagcaggaaatcgcgaatgcgacaacgcagcagacggtcccgatgccatatgcgagcaggggcctgccatcttccagcatgagtgccgatgcgccattgacggccagcatgggacggatcacgaaccataataaggcaggttgtgcaatcgcaaatgagaaaccggaaagcagttccttgaagatggacggcgttccacggcggaataccatcgggcgtgcgggcgagtagctttgttcccctcgtagtccggaaccaaggaacgcataccagcaggcgacagttggaacgagcaaaagaacaaacgcgattttgatgtgttgattaatgccataagccgttggcagaccggcattgacgacgatgtttttgatgatcagacaaggtaatgcgcattgcgccacgcagatgaggaattcgccgactgcaagcagaagctgaatatgcatgcctcgtgtgcgcgtagtgaggatgtatgcatattgcggcgcgctggatgcggtggaatcgggcgtaaggcatgcggggcagatatggctgcatgcctgatggtatttgaggcattgcgtgcaccgtacatattcccctgaatcccgtggaagcagccaagacagcgcaataagcacgatgccgacgcatagcgccgcaatcgcatggatggaatcaatcgtcatctcgtcacattccccaactccgcatagagtctcttccactagcccatgcattagtctaatgcgtgcaatgaacgatagccattcgtgcgacaacgatgcgtggcgttttatgcatcagtgccatattctgttcgcatagaagttcttagctgttttcgctggagaaaccaatggaggtgtctcatgaatgaagtgatgcgaagaagtgcctgttgtttgttgtcggctttgttgctgtgctcatgcgtcggttgtgcaaattccgtacacgaaatctctgaaggagacgctgcccagagcagcagtaagaacgatgatgcagcggagcaagcgtataaagcgtttactgtggacgctttggaccgtattgccgccgacgatctcaataactcagacaaactggttctagtaaacaagctgggcgcgaaatccgtgcacggcgatgatgctattccatttgccaaaaaggtcgacgaaaacaatatgtattatgtcgtttccatgtgcaaacagaaggagcaggctccttactcacttgtcctctacaaagatggacagccgcacactgtaaccactagggaatcctgtacttctaatggagtggaaacagtctctcttccggcgaagaatttccctagcgccacctcattgtccattatcaatatcggcaatacggatcttgttgtttccgtatatgaagtaaaggaaaaccatcatgaataagcgaaataaagtagttgcagtaattactagtattttgttggctgcctctatggcatctctctcgattcctgcgcaggctgagcaaaatactgacgttgcgcctatgtcttgtcccgaaattggacatcatcagtctgtctctaacaaaggccgcatattcatggcaggttctctacctaaaaattggctttcgcctggtgggacatacactgtaacaaaagccaaaactacaacggtcactgggagtgttacaggcggagtggatgctgaattttcctcatatgttaaggcacatgtgcaatcgagtctatcaacctcacagactgtctctgaaagtcagggatggagttggacaaacacatcaaataccacaaaatgggttcaacttggtgcagctggatacgaattcgattacacacggtatgacgtcgtttctccgtgtaatgtcgtcaatcaaaaatataagcatgcaaagatgccgacaaaccagccatggttatatcacaattgatgtttccagaaaacatcgcggcaacaccagagaacaaattgtgccttgccctccatttctagagtttttctgtgggggaaaacattagcttaacttgatgggctagtggaattgtcagggacaatgaccattcttcattttctgaatttatggtcattgtcccattatgttgttgcgcaaaatcttgtatgagggctgtcccgtagtgattttctggagcactatttattgcggcgttatatagatttgatgcgaagatgcgaaccgcatctggtcctacagagaggataaaagcaaaagccccgggtttcccgtgtttggcaatgttattgagaatttcggtacaaaccgtttgcaacgatggtagtagtgacttgtccattgcgtttagattcccgcggattattggtgtcccggtaaaacccagtattctcagtcttttgcattgagcttctatatgttgttgaaagagctcgtccgcgtcttcctctttgtctgttttaagctcatcggtcatcgggctgataatttgagtgcgaagctcatgtaatgcctgcatgaggacttgttcaatctgtggcaaagtgtcgctgctctctgagggctctttcttgcgacacagcagaatcgcatatgtcatagctcctgcgatggaatcgtgcagtatgtgaatttctttgagtcttttctgctggcgtcgaacttgttcttgtgcaatcgccaggtcggttttccgttgctctgtctgtatcttccaccgtatggcaaagccaacgaagaatgctccaatgtaggagcacgcaagcacagggatgcttggattgtagtcgatgccgcctgtccaatagcccaaaggaagtgctagtgcgcaaagcagcggtcccatgatggcaaattcaaatcgtttgatttcaaaagcaactattccacatacaagccatgtgccatataacgtcgaagggccatcgcatattgccgggattattgcacatgctatgtgtgttacaagaatcgccatgcttgccggtacggggaaccaagtcagtagcaacagagcgatgcagtacggagccaaatatagccatgaccaaggtgacatatttggccaagcggtcagctcgagcaggaaaaagcagatacagataatggatcccgctaagtaaggcttgcgcacggcctttgccaatgacattatttgttggggcagcctcatcgttatatccaaccgtttcttacgcacatcgcaacagcttcggcacgactatgagcatggagcttctcgaaagctcgtcgtgcatatgtctttaccgatgcttcgctgatattcagttggtgtgcaatagtggaagtggtgaatcctctcgcatagttggcaatgatctgtaattccttgccggaaagccgcatggagtttatgctcttccccgcccacgacgcaacctcgtcatttccagtggcttttccgatgattcgaaccagttgaatcgtgggaatttcttttggaataatcgcataaaacgcatcggaccattgtgctccgtatcttttttcgttttcgtcatccaaaaaggcgctgataccaatgacggcaatatctggatgttgttccttgatatgatgcgctaattccgagccgttcatcccaggcattgcgatatcggtaagcacggcttgtggcctttgtgcagagtccctcatggcctcaagtgcttgttctgcagaggtgacagtccacagaatctgtattggtgcgcatgtctcgaccaataagctttgaattgcgctcgcgaccagtggatcattatccacaatccctagagtcgaatcattgacaatcgtgcgcatataaattcccccgtggtttgtttctcgttccagaatagacatttttcgcagctgcaatagatcgcggcgttaccggtgagacacatgttgcgaacccattcaaaagcaaatattttgtacaaaaaatttgtatataatgggaggcggtggaaaggagacctttgcaatgactgacgtgacccctaacgaagcgcggatgcccgaagatgccgcagtgaccgtgaccaatgccgatactcttcgggccatggcgagtccgattcgtatgagaatccttggaacgttgcgggtgaatggcgagcagaccgtgggaagcatcagcgagcagcttggcgaggctccgggggccatcagctatcacttggggcagcttgcacgggtgggactggtggagaaggtgaggtctcctgatggcgaccgaagaaaaagctggtggaaggcttgccaaaccgccgttcgtctggggaactccgaagaaaagaacagtgcagacaaggcaaaggccatggatctgtttcggcgttcggcggcactttcctacgagatggcctacgagcgttttctggacaggctgccggaattgcctcgggaatgggccgattcatgcaccagcgacgatcatgttctgaacctgaccgccgaggaaatgtgtttaatgattgaggaactcaatgaggtcgtacgtcgctggcaaatcaaggccggcatgcacggcgacgatgagctgggtgtcgaacccgtggcgctgattctacaggctttcaggtggttttcgtaaggaatcggcggactttgcatatggacccataggcgatctgaacagcgtggacggaacagggaaaacaagtgaaacaagacatggacggaacagcgaaatcattctggcaatccgcagggtacgtttcttggtttaccgctgatacggcgtcggcggtcggagcggcgctgcgcgcactggcgatcagtttgctcggatatgcggtgtccggttccaccatcgccgccggttggctcggaacgtcgtcgatgatcgcgcaacaggttgcgagcgtattcggaggtaccttcgtcgacaggcatgaccgcaaacggcttatcgtggcgaacgccgtcgtcggcgttctggcttggggcgcgattgcggtgctgctgctgtgcgacgcgttgtcgttccccgtgttgctgctgatcgcggtgctcgcatccggcatcaacggatttcttgggagcgctacggatgcgatgcttcgctcgatcatcgatatccgctattatcccaaggcgcggagcctcaacgaggggcgtgacgcaaccatcgccatggcgggaagccccatcggaggttttctgtacagcattgctccatggctgccgttccttgcgtcggcatgcatgtatgccgtggccggcgtcgccgccaccggcatccgcgaacatggttcggatggcgggcgtatcggggaaacggatggcgatgcagtgaaaggcggtttcttccgcgatttcctggaaggctggtcatggtcgttgcacaggaaaacgctggcgatcgtgctcatcgtggcggcattggtcaatttcggcgtcaatggcatccaatatgccatccagctgcatttggtgtcgtgcgggaccaatgcgacctccatcggattcatcagtggcggcatatcgctgatgatgcttgtgggatcgttgctggccggcaaactcagcgataaggttccggttggaccaaccgtgtgcctcgcctacctgttcatctgcttatgcgtattgccgatgacgttgaccgacagctactggatcatgctggttgccaattcgtttgttggcctgccgttcccgttgatcaacgcgatgctcctcggtttcatcttcgccaagtcgcctacgagcatgcaggggcgtattactgttacattgacggttccggcccaggtgctttcgatgttctgtagtgctgtggctggcaccttgctcccggtttttggattccatggcgcggtgctggtgttcctcgcggttcttgtggcaagtgccgtgctggtgatatgttcccgttccattcgtagcattcccaaggcggcgcaatgggaacatacgatgttgcggtgaatcgaaataaaaagcgccgctccacgaaacgaatcgtggggcggcgctttgccgtaggcaatgccgctcagcccgttcagcggccggtgatctcggagccgagcaccttctcgctcagggctttcgggccgcgggtcacggcgaccgcgccggagcggaccagctcgatgatgccgtaatgctccaacagaccgagcagcgcgtcaatcttgccctcggcgccggtggcctcgatggtcagcgattccggattcacgtccaccacgcgcacgcggaacaggcgcacgatctcgagcacgtcggaacggacggactcgtcggcggacaccttgatgagcaccagctcgcgctccacagtggtctccggatcgaggtccacgatcttcagcacgtgcagcagcttgttgagctgcttgataatctgctcgagcggcacctcctccacttcggcggtgacggtgacgcgggagatgtccggacgctcggtgggggagacggacagcgaatcgatgttgaacgcacgacgggcgaacaggccggagatgcgcgccagcacgcccggacggttctcgacgagcacggatagcgtatgacgcttggaacccggctgggatgcaggataatttgccatgatcgaaatttccttccttacgctctactcgttcagtcgttctcgccggcgcgctgcaaaggcttcacgcccggcttgtacgtgacgttgtcgttggaatcgccggctgcgaccatcggccacaccatggcgtccttccacacgcggaaatcgatcagcaccggacggtcgttgatttcgttggccttcttgatgcattcgatggcctcgtccttggtgaacgcgcgcatgccgacgcagccgtacgcttcggcgagcttcacgaagtccggcacgtccacgatgtccggcgtgttctcgccgtccagcaggttcgtcgcggaatagtggtgatcgtagaacagggtctgccactgacggaccatgccgtacacggagttgttgagcagtgcgatcttcaccggagtgcggtcgaggaacgcggccgccagctcttcggaggtcatctggaaggagccgtcgccgtcgatgagccacaccggcttcttgttgtcgaattcgcgggcggagccgacgcgggcgccgatggccgccggcaggccgaagcccatcgtgcccaggccgccggaggacagccaggagtggggcttgttgaattcgatgatttgggtggcccacatctgatgctggcccacgccggaaacccagatggtgtccggatcggccatgtcggacagctgcttgacgacccactgcggggcgaggctgccgtcggtcggttcgtcccatgtaatcggataatcctcgacccacttgttgatgacgtcccaccagtggctggtgtcgggcttgccgtgcacggcctgctctcgcttgatctccgggatgaggtccttgagcacagtggccacatcgccgacgatcggcacgtccggctgacggttcttgccgatttccgccggatcgatgtcgatatggatcacacgcgcacccggcgcgaacgcgtcgagcttgccagtgacgcggtcgtcgaaacgtgcgccgatcgcgaccagcaggtcgcagcgctgcacggcgccggtcgccgcgatcgtgccatgcatgccgagcatgccgagcaccttcggatcggaatccggcacgatgccgcgcgccggcagggtggtgacgatcggagcgccggtcacatcggccagctccttgacgagctcgcccgcgtcggagcgcaccgcgccgccgccgacgtacagcaccggacgatacgactgctcgaacagcttcgccgcgtcggacagcacacgaccgtgcgccttggtagtcggattgtatcccggcaggatcatgcgctgcggccaggaatagtacatctcgccggtctgcgcggtcttggtgacgtccaccaccaccggtcccggacggccggagcgtgcgatgtagtgcgcctcggtcagcacgcgcggaatgtcctgcgcgcgggtgacgaggtacgaatgcttgaccaccggataggtggcgccgacgatatcggcttcctggaaagcgtccgtgccgatggcgttcacgccgacctggccggtgatgacgaccataggaatggaatccatgttcgcgtcggcgatcggggtgatcatgttcgtcgcgcccggaccggaagtgacgatgcacacgcccacctgtccggtggtcagcgcgtagccttctgccgcatgtccggcggcctgctcgtgacgcatcagcacgaagcggaacttcgtatcgtccttgatggaatcgtagacgggcagaatcgcaccgcccggaacgccgaagacgtccttgacgcccagatcctccagcgaacgaaccagcgcttcggcgccggtcatcttttcgccgtcgacaatggtctgcttttcagtggtagcggatgcctttggcatgccgctgaatgcctgcagaggcgtaggtaacaccatgttccctctcatgctcgttcgtggaaaatttcctcgtaaggggccgcggtcgcgtcgttcatgcgccgttttaccccttaaacggaatgctatgcaaccgcttgtggcggattgcagccgcattcctctctgataatgagtctatgctaacggctgacagcttggttcgccggaaaggcccatattctggcgcgttacgcgccattgtgatatggaccatattttttgcgattgcgacgctgccttgtaatgctgtttcgtgacgccggccgtgccgccgcttgcgttaccgtttgcgcggttacttgccctgcgctgcatcctgcgtgccaccgttggacttgcggtgtgacctgtggtgcgacttatgcgtcttcccgttctgcttgccgcccatttcgcccttgcgactgtcaagcgccttccagcccatttccgcggccgccagctgcgccttgcgtttgctgctgccggtaccgacgccgatgacttcgccgccatcgccgagaatcgcgcgcgcggtgaactccagtgcgtattccggtccggcgaccgacgtctggtagtgcgggtcgggcagacccatctcatgcgccttgacggtcagcgacgtcttccaatcgagcgccggaccttcggtggcgacctccgccagcgtatcgtcgacgagatgatgcaccacgcggcgcgcctcgtcgatgccgtgctggatgaacgtcgcgccgatcagcgattcgacgatgtcgcacagaatcgagcttttgtccgcgccgccctgttccgcctcgccgtggccgagcagaatgtacgggccgacgtgcagtttttcacgggcgattttgctcagggattcctcggaaaccgccttcgcgcgcattttggccagctggccttcgttcatgtcgggatgcaccttgtacagcgtttccgtggagaccagttcgagcaccgcatcaccgaggaattcgaggcgttcgtagttcttggcgccttcgtgctcgtgtgagaacgagcggtgggtgagcgcttcgacgagcaggtccggctcgattgtggtgccgagcgcctcgagcaacacattggcggtcatctcgccttcgggggtgatggacgtgccgatgcggccggcgttggtattgttgccgttttcggtttgggtgttgttctgtgcgttgtcctgattggtctctttggccatggatgttccttaccgttcatgcggcgggccgagcctgccgcggtctgtggttgtggccgttgcgcacatggcaagacgccagctgatctggcggttttgctacgcaagcaacgtatgtcgtacgccgatcgcacgtggaaataaatcgcaatgcaatcgccgtatcacttgataataataaaagaaaccctgccacccgtcgatggcagggtttcgatgctttataccgttatccggcaaccactcacttggtgtggatggagcggacagcctcgcggtacacgcggccgcggaaggaaccgcagctcgggcatgccatgtgcggcagcgtcggagcgccgcagttcgggcaggtaacggtctgggcggccttggccttccagtttgcgcggcgagaatgggtattcgcgcgcgaggtcttgtacttaggcagtgccattgtgtttcctctatttcgttcgaacgattgagcttaagcgttcagtatcttaacgtgagctccgtacaaacgatggaccatcccatccgaacggcttattccttgccttccagcttggctttcagcccttccagcgcggcgaaacgaatgtcggtcatgtcatgctgatggtcggggttctcgttgaggtcgatgccgcactgcgagcacaggcccttgcaatccggcttgcacaacggctgcagcggcagttcctcgaccagcgtgtcgcgcagcagcgcctcgaggtcggcccatgcgccgccgtcgagcagcgggtacgtgtcttccgcctcgtcctcgccggcgatgatgtccacttcctcttccttgccgttcttgccggcctttccgcccttgccggcggcggacttgtcctcatatgggaagaaggaggtgacgttcaccgtccaatcgcgctggatcggcttcaggcagcgcgtgcattcggcatgcacgggagcgctgatacgcgcgttcagaatcagaccgtcgacgatcgaatcgaacgagccgaccacgctcacatccgcgccttcgtccacgcccacgatctcatcgccgatgccgctcggcgcggggaaagcggcgtcgatctccttgctttgccccggacgcgaggccacctgcgccacggaaacggcccatggggaatcttcagtacgtgccatagttcagtctttcatcgctttcttgctatgcgttccacgcgtgttacgcgtcttgttcagttttccggataatcgtccgcatcgagatggtccagatgcgcgccggcttcgcgttggcgatcgtacagcacgttcaggcccgcctgcacgccggtgccgatcttgtcgacctgctgttgcaacgattccatcatggtgatgcagtatttgtcggcgttctgcgtgagcttgtcggccttggcttgcgcctggtcgagaatgccgcgcgccttctgcctggcgagttccgtcacgttctcctgcccggcaaggaactgcgcctgctcgttggcttcgcgtacggtgtcggcggcacgcgactgcgcggatgcgatgatcgcgttggcttgcgtttgcgcgctttccagacggcgttccgattcgcgcatcagcgcggaggcgcgttccagctgcactggcagcatcttcttgagtttgtcgagcttgccggtgaacgattcgcggtccacgcgcaccgagctcggcgcgaacagaatcggcttggcctcgtccaattcctcttcgatgctgtcgatgatgtcgtagacggtggtgaattcgtcgcggctgcgattcgaactgtcgtcgagtggcgcatcgggatcgaacgtggcacgaaggtcgggcaggtccgacatggaaatcgacggtttcgacgatttcgcgggctttgccggctcatccgtagcacggtcggcggcattgccggttgcggagttgttggtcgctgcggtaccggcaacagcgccggtggccggataatcggccgccgccgtgaccggctgctgcgacgtggcgtcatcggcgtcagcaagcggcttgaaatcgttggtctcttcactcatcatgctctcttttcgttcttgagcgcctcgccgagcagtggaatcacgcaatcgggcaccatgcccgtcacatcgcctccgtgccgtgccacgtccttgacgatggagctggagatgtgctccaggtccggggccgcaggcagaaacagcgtctccactccggcgagtttgcggttgaccaatgccatgcccagctcagcctcgtaatcgccgttctgccgaagtcctttgacgatgaccgtcgcaccgatttccgtgcaatagtcggtgatcaggccggtggtcgacgccaccttcacattggtgcaaccgcgcttggcgagcgcctggcggatgatctcaacacgggtttcttcggagaacatcggcgtcttcgccgcgtttacggccaccaccacatgcacttcgtcgaaaaagcgcgcgcagcgctcgatgacgtccaggtggccggcggtcactgggtcgtacgacccggggcaaactgcaattgtcataaccttaagcgtaccgcgattggttgagaacgtgcgcaacatcggcgtatgcccgtgttggcgcggttcgtgcatacgggtggcggcgcaatgcggctcggctatgatggaaggcagtggggccgcgattgcggcttgtgtgaggagtcttaattatggcatttgcgattttcgatggcctgttcggatccgacgatccggtttcgccgctgtccaacccggatgcgggtaccggtaccgccgttctggaacgtcctgaagaggaaacgaagcttgatgacggtggcaatggcgatgccgaccgtttcgcgcattatgtgtcgcgtgaccgtatcgccgaatcgaagatgacgggtcgtccggttgtggcgttgtgcggcaaggtgtgggtgccgaagcgtgaccccacgcattacccggtgtgcccggattgcaagcgcatctatgacgagatgatgaacagctcgttctgattgccgttcgaccatgttgtcgattcatgccgccggttgcggtggctgaacgtggcgattgaatatggcggctgggtgcggcgaccgagtgcggcgcaacgtcgtatgttatgcaaaaaccgacgccggtgattcaccgggcgtcggtttttgttatgtcttttgcgctgtacagggcgctttactccatgacggacgtcacagcacggtgacttcggtcgggatgaccggatcgcccttcatcaggctctgcgcgccgatcggcagttcggcgagcgcctgcgcgcggtagttgtgcgcgttgacgatcgcgtcgtggccctggtattcgctgtggttctcgccattggtgacgtagtcgacgagcaggtccttccagccgtcttccggctggtatgcggcgagcttgtcttcggagccggagatgacgtgttcgcagtcggccagcgagtattcgtaggagcggaaggcgagcttgcggcccggaacggtggccttgtccttcgacttcttggcgaccggctgcatttcgccggcggagttctcgcgttcggtgagcttgtagaccatcgcgcaggtcggggcgcccgagccggtgacgagcatggtgcccacgccgtaggagtcgaccggtgcggtctgcagtgcggccagcgcgtattcatcgaggtcgttggtgacggtgatcttcgtgttggtggcgccgagcgcgtccagctggttgcgcacgcgctgcgcgagggacgcgaggtcgcccgaatcgatgcgcacgccgcccagttccggtccggccacttcgacggcggttttcacggcttcttcgatgttgtaggtgtcgaccagcagcgtggtgttcttgccgagcgccgcgatctgcgattcgaaggcgcttttctcgtcgtcatgcaccagggtgaagcagtgcgcggcggtgccgatggccttcagaccgtacatttgcgcggccagcaggttggcggtgcctttgaatccgcccaccacggcggcgcgtgcggcggcgaccgcggcccattcgttcgtgcggcgtccgcccatatccatgcacggacggtccttcgcggcggtggccatgcgggacgcggcggaggcgacggcggaatcgtaattcagaatgctcagcagcagcgtttccagcagcgtgcattcgccgaacgtgccttcgacctgcaggatcggcgagttcgggaagaacatctcgccttcgcggtagcccttgatggagccggagaagtggaagttctccagccatttgatggtttccgggcttaccaccttgcggtcggcgaggaatttcaggtcgttgtcgtcgaggtggaacttctcgagcgcgtcgaggatgcgtccctgtccggcggccacgccgtagtggcggcccaacggcagatgccgggtgaagatctcgaatacgcacttgcggttggcggtgccgtccttcaggcaagcgtcaagcatggtgtattcgtacatgtcggtcatgagtgcgggtgaataatccagcatttccaaagcctttcttgacttttggtgaaactgaccataagtgtaggacccacggtggccaatctttggttgcatcccatcatacgtgcaggaggggtctcgaggcgcggcgtgcttggctggtgatagggtcgaatgctgaaaagacgagtaatcggacggcggcaaaagccgaaatcagcggaaagcgaagtgcagaacagcaatggtagcgattaaggatatgttgggcgaccagaccgtggtgcgtgcggacggacgcaaggtggacgaactgcgcccggtgcgcatcacccggcatttcacggacgttccggaaggctccgtgctcatcgaatgcggcaacacgcgcgtgatgtgtaccgccacgttcacggccggcgtgccgcgctggcgcaaggactccggcctgggctgggtcaccgcggaatacgcgatgctgccgcgcgccaccgccgaccgcaccgaccgcgagtccgtgcgcggcaagatcggcggccgtacgcacgagatcagccgtctgatcggccgctgcctgcgtggcgtcgtcgatatgaaggcgctcggcgaaaaccaggtgcagatcgactgcgacgtgctgcaggccgacggcggcacccgcaccgcttcgatcaccggcgcgtacgtggcgctcgtcgacgcgatgcattgggccgaggaacacaagcacgtcaagtccgccgaccgtgtgctcaaggactgggtctccgccgtctccgtcggcgtgatcaacggcaagccgatgctggacctgccgtacatcgaagacagccaggccatgaccgacatgaacgtggccatgaccggttccggcgatttcatcgagatccagggcaccgccgagcatcgtccgttcaaccgcgccgaactcaacaccctgctcgacctcgccgaaaaaggcaacagggagctgcaggccgcccaacgcgccgcgctcgcgctcgactgagccgatcgacggcacggcatgcgctgaatgtaggacgttgacggtccgatgccggcgactcggcgcatagaacaacgcaaaacagatataagtaggaaaacgacggaaggaaccgtaaggcatgaagatcatcgtcgccacgcataacggaggcaaactggcggaaatccgccgcattctcgaggaacgtctcggcgcggacgccgccgacatcgagctcgtctccgcaggctccttgggattgcccgatccggtcgaggacggcgtgaccttccaggagaacgcgctcatcaaggcacgcgacgtggccgaacgcaccggctgcccggcagtcgcggacgattccggcctgatcgtggacgtcatgggcaacgcgccgggcatcctgtccgcacgctgggccggcgagcacggcaacgacaaggccaacaacgcgctgctgctcaagcagctggccgacatccccgacagcaagcgcaccgcacggttccgctgcgccgccgcgctggtcgtgccgggagagcgcaaagcggacggtgcggatgatgataagccgtacacgatcgccagcgaaaccgtcgaagtcggcgaaatgccgggcgtgctgctgcgtgccccgcgcggtgccaacggtttcggctacgatccgctgtttgtgccgaacgatcagccgcagcgtgcggtcgatgccggcgaaaagctcacgtccgccgaaatggagccggccgagaagaacgcggtctcccatcgaggcaaggcgctgcgcgcgctggtcgcatcgatcgaagcgctggtcaaataacatcggatgacggccgcgacgggcgcttgccgtggcgcacgacactggatggcgtgcgtgcgatttgtgctcgtccggtttttccgctatgctttgtttcttgtgcgcggctagcgtatgcttaccgggcattgcgccactttagctcagtcggtagagcggctcactcgtaatgagcaggtcgacagttcgattctgtcaagtggctccactgccctagatgttcggaggttttccgagcatctagggttttgcatatgtgcattcgtgcgtatcggttttcgccgtgcgcggatggtgattgcgcgagtggcggaattggtagacgcgcaggatttaggttcctgtgtctttgacgtgtgggttcaagtcccatctcgcgcacatgtccacgttaattcagccaatcgcgctgctggccatcatcctcaccggctacctgttcaaacgcgccggcaaattcaaaaaccgcgactaccgcatcatgcaggtcgccctgttcaacctggttctgccctgcgccatcatctactcgttcgccacgaacccgcatgattccagcatgctgtggatctccgtcttcggcttcgtggtcgcgttcatcccgcccgtgctcatcttcctcaccacacgtcacacgcctgtgcaggatcgcgcgttcaccatgctcaacggttccggcttcaacatcggctgcttctgcttccccgtggtacaggcgtttctcggcaccgcggcgatcgtgccagcggccatgttcgacatcggcaactgcgtgatggtggcggccggcacgaacgtcatgacgcagaccctcctgcacatccagcccggcaagaccttggacgagcagtaccaggggcatgcgccggtgctgccgtatacgaaacccaaggatcgcgatgcccgccggctggcacgccacgcgctgctacgcaacgtggcgaaaggcttcttcggctccatcccgttcgacacctacctggtcatgatcgtgctcatgcttgccaatgtgaagatccccgccgtcgtggccacgttcgttgagccgctcgccaacgccaactcgttcgtcgccatgctgatggtcggcatgctgatggacctgcccgccggccgtgacgatgtgatgaagctgctgaagatcatcggcctgcgactgccattcggcctgctgtccgccgtctgcgcatggttcgtgctgccgttcggcgccaatgtgcgcgaagccgtggtgatgtgctgcctcgcgccaatcgccgtgttctccaccctgttcaccgacgaagtgctcggcaatgcgaaactcgccggcttctcgctgtccgtgtccgcgatcatcggcctggtcatgatgaccggcgcgcacttcctgctcgccgccatcgcctgacttgcgtaagccgcgtgcgtggtcgtgcgtaagttgcgtacgtaatcgtaatgcgatcgttgcatacgacagccgttttcacgtgcgttgaagcttttccgctgaacgttgcatacgatttcagtaatcgtcgtttatctggcatgtcgccgctgaaaagtggtcggaaccgcggtatatcgcgcttccgaccgaatgtgttaactcgggaaacatttttgtgttgttctgtcggcttttgtgagtatcttgtgaggtgaagaaaacggctcgtgccgtggaaaatcgaacgagattccaccgtcacgttccgcttcacagtgatgatgaaaggacctatcaacatggccatcaatcctcccgttgacgccaccaagaccccggagtgggccgcgctgcagaagcactacgacgagctgcagtccgagggcatcagcctcaagcagtggttcgccgatgacgccgagcgcgtcgagaagctgagcttcgatgcaggcgacctgcacttcgatctgtccaagaacctgatcaagccggagaccctgcagctgttcgccgacctggccaaggccgtcaagctcgacgagcgcaccaaggccatgtacaccggcgtgcacatcaacaacaccgaggaccgcgccgtgctgcacaccgcgctgcgccgcccggtcgaggacgagggcaagtacatcgtcgacggccaggacaccgtcaaggacgtgcgtgaggtgctcgaccgcatctacgcgttcgccgacaaggtccgctccggcgagtggaccggcgtgaccggcaagaagatcgagaccgtggtcaacatcggcatcggtggttccgacctgggtcccgtcatggtgtacgaggctctgaagccgtacgccgacgccggcatctccgcccgctacatctccaacatcgacccgaacgacctggccgagaagaccaagggcctcgatccggagaccaccctgttcatcatcgtttccaagaccttcaccaccttggaaaccctgaccaacgcccgtgaggcccgcacctggctgctcgaagagctcaaggccaagggcgccatcgacggttccgacgccaagaacgccgaagccatcaagaagcacttcgtcgccgtctccaccaacctggagaaggtcgccgagttcggcatcgacccgaacaacgcgttcggcttctggaactgggtcggcggccgttactccgtcgattccgccgtcggcacctccctcgccgtggtcttcggcccggcccgcttcgaggagttcctgcacggcttccacgagatcgacgaatacttcgccaacaccccgttcgagaagaacgtcgtcgtgctgctcggcatgctgaacgtgtggtaccgcaacttcttcaaggtcgcctcccacgccgtgctgccgtacgaccagtacctgcaccgcttcccggcctacctgcagcagctgaccatggagtccaacggcaagtccgtgcgttgggacggcaccccggtcacctccgagaccggcgagatcttctggggcgagccgggcaccaacggccagcacgccttctaccagctgatccaccagggcacccagctcatcccggccgacttcatcgcgttcgtgaacaccccgaacccgaccaaggacggcgaccaggacgtgcacgagctgttcctgggcaactacttcgcccagaccaaggccctggccttcggcaagaccgccgacgaagtgcgcgctgagggcaccccggaagagatcgtcccggcccgcgtgttcaccggcaaccgtccgaccacctccatcttcggcgtggctctgaccccgttcgcgctcggcgagctcatcgccctgtacgagcacatcaccttcgtcgagggcaccgtgtggggtctggactcctacgaccagtggggcgtcgagctcggcaagcagcttgccaagcaaatcaccccggccatctccaaggatgacgaggctctggccgcccaggatccgtccacccagtccctgatcaagttctaccgcgccaaccgtgagttctgattccgctgcgttgcatcagaactcacggttgcgcgcgccgcacggtgttgtctggtgaacggtctggcgaccgttcatgccgcgagttctgatcttccatcgaaacgtggcgtctagcgcgtacgtggcataccccatccgtgtcttacggatggggtatttttgattattgctgtgccgaaaggcgggacgccgcataatcccgcttttctgtgggtccagccggaacggtcgcaggtaactccggccgtgctttatcgcaatatttccggcggatcggcaacccttcgcaggcagacctgcggagcggaagaacaggccgagacggcaatcgcaagaacgccgtacgaagcccttacctgtgcgccgatatgcggcggcgactcgaggaaacacaatggttaacgctattgaggcatttgacgccaagcacctgaagccggccgaggaaatcccggctttccgtcccggtgacaccgtcgaagtcaacgtgaagatcaaggaaggcaacaactcccgtctgcaggctttcaccggcgtggtgatcgctcgtcagggcggcggcgttcgtgagaccttcgtggtccgcaagatcagcttcggcaccggtgtcgagcgccgcttcccgctgcactccccggccatcgattccatcaaggtggtccgcaagggccgcgtgcgtcgcgccaagctgtactacctgcgcaacctgcgcggtaaggccgctcgtatcgtcgagcgccgcgacaactccgagaagtgagttcgaatcgcaaataaagcgtgaaatcggctcttcggcaacccgtcgaggagccgattttctatattgggccgctatgataggggccagtgcgtgaaaccggacggtaaggaatcccatgaagcatgccagaagaagagtcgaaagcgaggaaagcttcggcttacgagacaccctgatctggtgcggcatacccatcgtcatcgtgctgctggtgcgcatgttcctgttcggcttctacgtgattccgtccggctccatgctgaacaccatcgaaccgggcgaccgggtcatcaccagcaaactcacccccaaagtcttcaagctccagcgcggcgacgtggtggtcttcaaggaccccgaccattggctgcagcaggagaacagcggccgattcggcggcgactacctcatcaaacgacttatcggcctgcccggtgacaccgtggcctgcgaggggcccggcaagccggtcacggtcaacggtgtggccatcgacgaaacttcgtacatccgctccggcgtggaccccagctccttcgcgttcagtgaaaaagtgactgcgggacatgtgttcgtcatgggcgacaatcgcgccaattccgccgattcccgctaccatcaggacgattcctcgcacggcctcgtgccggtttccgacgtggtcggcgtcggtctggtcaagtattggccgctgaaccacatcagcacgctggacgcgcatcacgacgtgttcagggacgtgccggaaggatctgccgactgatgtccgtttccgtagtgcccacgctggatatggaacgggcgatcgcggcctccggctacgacgtgatcgtcggcttcgacgaggtcggccgcggctcgctcgccggtcccgtcatggtcggcgccgccgcaatccgcacgtgcgacctggccggttcgtcgccgctgcaagtgcccgacggcgtggccgattccaaaatgctgacggaacaccgccgcgaagccatattcgaagagcttaaatcgtggtgcgcgtcctgggcggtcggctcggccagcaacacggaaatcgacgattggggcatctcctacgcgctcggcgtggccgcattgcgcgcactcggccaagcggaagagaaactcggcatcgacggcgatggcatgcttgacggcaagccggtgaaggtcggtgcgatcctcgacggaccgaacgactacatcaccaaggcgctgaacaccttcgacgcgccggacgtgccggtgccagcggacgtcgccaccaaagtgaaaggcgaccggtactgcgccaccgtggccaccgcagccgtcatcgccaaagtcacgcgagaccggctcatggtcgaactgggagcgcaaccccaatatgaaccctatgaatgggcccacaacaagggttacggttcggccgcacaccgtgacgccatcgctgaattcgggcccagcgacctgcaccgcctctcctggcatctcgtctgacatacggcatctcatccgcagtccgcgattacgctaatccttgcggatgatgcatgccggaaggaaacctgtaagttcatcccgccgtctgatggccgggaccaatccgtttccgtaccgtaggaaacatggaacacatacttcacgcgaccgatctggtcatggattattcgacccaacaggctacaccgaacgccacacacatgctggcgctcaatcacgtggatttcggcatccaggcaggcgaaagcatcgcggtcatgggaccgtccggttccggcaaatcgacgttactgcacgcactcgccggcatcatcaccccgacagccggcaatgtgatgtttcgcggtgccaacctggcgcggttgagcgacgctgaccgcaccaaactgcgccgcagcgccttcggcttcgtcttccaatccggacagctgctgccggaactgccggccatcgaaaacatcgcgttgccgatgatgctgggcggcgcaagctaccagcaggccaccgacacggccatgctatggctggaacgattgggattgcgccagctcgcgcaacaacgtcccggcgaaatgagcggcggccagatgcagcgcatcgccatcgcacgtgcgctcgccgcgcagccggcagtcatcttcgccgatgaaccgaccggcgcgctcgaccagaccaccggccacgaaatcatgagcattctcatgcggaccgcacgacagaccggcgcggccgtggtcgtggtgacgcacgattcgaacgtggccgcattctgcgatgccaccgttaccatgcgtgacggcaggctgagctcgccgcagcaatcccaacctaccgccggaggcgcacgatgaacatgttccgattatggcgattgttccaccgctccggcacccgcggcacatccagccgcacctctgcgctggccatcgttgccttcgcatccgccaccgccgtcttcctaaccgtgctcggaggcctgcatggcttcatctggcgggcctccgccgaccacacgttcggttgcatgatcaattccaacaggtgcgcgcccggtacatacgaaacatggtccaaaaccctggcgcacgccgacaagctcgtcgccacggtcggcgacggccattggacggccgaccaggccacagccgtcatgaacacctattccgacggctatgtgctgctcgccgcattcgccagtctgctactcatcgtgccgttcgtggcgctcgccggctcggcggcccgtctcgcggcctcccgcagggacgcacgtctcgccgcactgcgacttgcgggcgccaccaccgcgcaggtcacgaaactcaccgcgctcgatgcgggtggccaggctctgcttggcgcgctggtcggcatggccggctacttcgcgctgataccggcgatcatgctgctcgacttccaaaaccagcatttcaccttcgaacagttgtgggtgggactgcctgctctggcggccgtgaccgtcggagtcacgctgcttgccttggtctccgcgctggtcgccctacgccgcgtggccatcaccccgcttggcgtgacgcaacgtaccggacaacccatgccatccgcatggcgcgcactgattttccttgccgtgttggccgtaggctacctgctgctcaacagcatctccgcattcgcgcacttgggtcagatggtggtctacgccatcatcttcggcgtcttcttcctcggtttcgccatggtgaacgtcgccggtacctgggtggtggcgatgcgcgccagatcgcgtgcgaaacacccgaaggacgcggccactatgattgccatgcgccgtatcctcgacaatcccaagcgtgcttggcgtaacgtgtccggtgtggcgctcgctgtgttcatcgcggggatgacgtcggtgtgcggattgctcgccaccggaatcggaggcaaccacgacccgttcgacccatctatgctgtacatgcgcgatatagcgatgggtggtttcctgacgctcgcctttgccgcggtgctcgccgccgtcagttccggcgtgatgcagacgggcaacgtctacgaccaagccgacgagtaccgcatgcttgcgttggaaggcacggatgaggcgacgctcgacaaggcacgcatgatggaagtgatcaccccgctcaacacggtgatggccgtttcattggggtgctcggtgttgttgctgtttccgattctggcaacgtcgttgctcaatccggcttcgttgcttacgttggccgcgggaatcggcttgtgttatgcgctgatggtactcggagggtgtgccgcgaatcatgcggcgcacgggctcggtcatgccggctaccgtatggacgattgatggcctcgccgcggcgctcgtggataccgcggcgaggactggcgaggtcagccgagcagcaccgcgatgatcgcgatgaaaatcggcgacgacaacgtcgagaacagaatgccgtcgcgtgcgaacgacagacccacgttgtaccgcgccgcgtagttgtagacgttctggccagtcggcagagcggcgagcaccacgcacgcgtacagcgtggcgccacggaagcccatcacgaaatacgacagcaggaacgcgatgatcggcatcacaatgttcttcaaagcggccaccgtgaacaccgccggaatattcgacttgtcctgcaacggcttcgtgccgtgcaacgacatgccgaacgccatcagaatcatcggcaccgcggaatcgccgatcatatcgatcgggtcgtagatgaagctcggaatcacgaaatagccgaccttcgcggaaatcgcggacacggcgatgcccagcagcgagccgatgagcagcggctgatgcaacggttgtttcaggatctccttcgcggagaccttgcctttggtggtcacgtcgagcacggtcaggccgatcggcgtgaacaccgcctgctgcatgaccagaatcggcgcgacaagcgccggattgcccagaatgtacgtggctatcggcaggccgatgttgttcgagttcagatacagcgaattcagtgcgccgatggtggcgtccgcggctttcatatggaagaacagccggttgaggatcaggaagaccacgcccaccagcagcgccgaaaaaaacgccacgacgatggaggaatggaagatctcgaagattttctccttggacaggatggcgaacatcaggcacggactcgacacgaagaagctgaaccgattaagcaccatctgcgcgctcggcccgccgatacgcatacgcgcggccacatagccggtcgcgatgacgatgccgatgacgcagaaaccttccatcgcgcttaacagacccggcattgcactctccttttcgttgcggccgttgcctttcgaccgctatctagtgtggcaccaagcgcgcgtcggtcgtatgcacgtctcaaaagcgagcccgatacacgattgacggcacgttttgccggataatggacggcatgagcgaacttacgattggattttccgcttccgccagcaaacaggagcagttgaacgagctgatggggcagatcatgggctgctattccgtcagcgatgacgaaggcccgttgacggacgccgtcgaggtgttcctgaaaaaacagccgcatctgacagtgcgcaggcacggcgatactctggtcgcgtccaccgatttcggccgcgagcgccgcgtgattcttgccggccatctcgacacggtgccggtgatcgacaatttcccgccgaaatggcttcagccgggcgatccgctgattcgcgaggacgtggcggccggtcatgagcatgagcgtgtgatctggggtcgtggcgccaccgatatgaagggttccgacgcggtcatgctgtatctggcggccacgctgacggatgcgaaatacgatttgacgtacgtgttttacgaccatgaggaagtcgcggccgagaagaacggcctgcgcaaggtggtcgagtcgcatccggattggattaccggcgatttcgcgatcatcggcgagccgaccgattgcggcatcgagggcggctgcaacggcacgatgcgattcgacgtgatcacgcacggcgttgccgcgcattcggcccgcgcctggatgggcaagaacgcgatccacgcggcggccgagattctgaaccgtttgaacgcacatgagaaccgcgccattgaagtagatggcctgacctatcaggagggcctgaacgccacgctgatttccggcggcaagggtaccaatgtgattcccgacgagtgccgtgtgcacgtcaactaccggttcgcgccggacaagtcgctcgccgaggcgaaggcgctgatgatcggcgcggatgcgggcgcgaaactcggcaacggcgagcatcaggccactggtggcgtgttcgaaggcttcggcatcgagatgaaggacgaatcgccgagcgcacgtccgggcctcaattcgccgcttgcccaatcgctggtatcgcttgtcaaggaacgtaccggtcgtgacccgcttgccaagctgggttggacggatgtggcgcgtttcgcgattctgggcattccggccgtgaatctcggcgcgggtagcccgctgctggctcacaagcaggacgagcagctgccggagaccgatctgctgctcatggccgacctgctggaggactggctgcgttgaatcgccgttgagtcgttgctgagctgccgttgaatcgccggtaattcgctgccgcgggcttgccgcagaaccactattggtccaccgttgaaccgctgctgaaccactatgccggcgcacgttcattcacggcgtgtcaacgcgaatcattggaaaacggagcgtgtagggggaataaatttcccgtcctgtcacgctccgttgttttttgtgtcatacttatagacggtggttctgcaagaccgccgacgcatccgatggcgttgatcccctcgcgtgaatgttctgtgagtcgcgagcgcaggtgtccgccgtcgcatgatgaagacttttgacggaagttgcttcctacgggcgccatgatgcgcggccacggtgagagcgtggtgtgagaaccgttggggcttgagtgaaggcgatgcgattgcagcgcgttgccgaggagcgttgtgcctactaccaatgagggcctcgatcaggtcgaggctgttgtgtcatccgataattcaaccaataatgcggcaagcagtgcgggttctgtgtctgccgatccggctccgcgccgccgtcgtggaggtcgccgcgtggtgcgtggcgtaggtgccgcgggcgcgtctttggagctgaaggtcgaggagcatgccaaagcccccttgtttgaggaaccgaagcttgagcctgtccagcctgcgcgtgattccgccgatttcaatgatgccgatgacgccgagccgtcgcgtccgcgtcgtcgtcgcgtgacccgttacgatgacgacgatgagatgcgtgacgaacgtccgcgccgtcgccgtcgttcctctgtggacgtgcaggacgaggatgatcgcccgtcgcgtcgccgtcgccgtatcagcgacgagccgcgtgatgaccgtgacgatcgtgacgatcgtgacgattacggcaatcgtggcaatcgtgacaatcgtgacgaatcatccgaagaccgtgcgctcgacgccgtcagcgcgctgccggaaggccatgagacgcgtcataatccgcgtccgatgacgtcgctgctgttccaggagccgattctgccggccgcccccgcgggccgcggatcgtccgacgatgacgatgctgacgatacgggccgcagaggttcggacgatgcccgtgacagccgtgatgaccgcgacgatgaccgtccgactcgtcgccgccgccgtcgcagccacgacacggccgacacggaccgcacggacgcttcgaatgacggtcgcggccgtgatgacggcaatgaccgcaacaacgacgccgaagacgatgagcatggcgattcccgccgctcccgtcgttcccgtcgtctgaacgcgcaggaacgtcgcgccgctgccgaagtggagcagatcgaggaggacctggtcctcgatggcatcacgtatgcgccgatcgatgacgagtcccgcaatggaaacgatgatgacgacgagcagccgacgcgcacccgtcgccgccgtcgcggacgcggcaaccatgaggaagccgacgagcagcagacctccgaacgcgaatcccgtcgccgtcatgaggatgacgatgaggaagagggcacggtgacccgtcgccgtcgccgccgccgtggagggtcgaaggccgaggaatcggacgagacgatgtcccgtcgctcccgcaagcagcagtacatcgacgagatcaccgacgtcgaaggatccacccgtctggaagccaagaagcagcgccgccgcgacaaccgtcgtgaacgcagccgtcagaaccagctcatggagcaggacttcctggcccgtcgcgaacacgtcgagcgtctgatggtggtgcgcgaacgtgagcgccacacccagatctccgtgatcgaagacaatgtgctcgtcgagcattacgtgtccgacatccaggaagtggccaccgtcggcaacatctatcttggccgcgtgcagaacgtgctgccgagcatggaggccgcgttcgtggacatcggacaggcccgcaacggcgtgctgtacgccggcgaggtgaactgggattccgcacgtctggaaggccagccgcgtcgtatcgaactggcgttcaagtcgggcgatccggtgctggtgcaggtaaccaaggatccgatcggccacaagggcgcaaggcttacctcgcaggtcaccttggccggccgtttcctcgtgctggtgccgtccggcggcatgaccggcgtgagccgcaagctgagcgagcgtgagcgcgcccgcctgaagaacatcgtgtcgaagatcgcgccgaaggatatgggcgtgatcatccgaaccgcggccgaaggcgcttccgaagaggccatcaccaaggatctcgagaacctggtgcgccagtgggaacgcatcaccgctaagcgcgacgagttcctgcacggcaagcgtccgaagctgttgcaaggcgagccggacgtggccatccgcgtggtgcgcgacatcttcaacgacgacttctccaagatgatcgtggaaggcgaccgcgtgtacgagcgtatcgaggaatacctcgacacgatggcccccgacctgaaagacaagctcgagaagtgggatccggccgaacatgacggcaaggacgtgttcgacaagtggcagatcgactcccagttgcgtaagggcatggaacgtcaggtctacctgccgtccggcggttcgatcgtcatcgaccgcaccgaggccatgaccaccatcgacgtgaacacgggccgtttcatcggccgcggcaagagcctcgaggaaacggtgacccgttgcaacctcgaagcggccgaagagatcgcgcgacagcttcgtctgcgcgacatcggcggcatggtgatgatcgacttcgttgacatggtcatgccggccaacagggatttggtgctccgccgactggtggagtgcctggcgcgcgaccgcaccaagcatcaggtggccgaagtcacctcgctgggactggtgcagatgacgcgcaagcgcatcggccagggtctggtggaggcgttctccgaggaatgcccgacctgcaagggccgcggcttcatcctccatgacgaaccgaccgtttcggcggattacgacgatccgtacgccctgaagggcggcgatccgttcgtcaagaccaacaagcatggccatggcacggacgtgcaggtgccgaagggctcctcgccggacgtgaaggccaaactcgcgcagatcgcggcggcagccgtggccgccaacaatgcggacctgggcgaggaagaacaagaagaataaaggaaaatcccggtatgtcaacctgacacgccgggagcagacttgcggttgtacgcgggtatgtgtagattagattgctggtgtctggccgcgaggctcgaacgtgccgggcagtaagctttccaagttaataaaggaacggatatgtacgctattgtgaaggccggcggccatcaggaaaaggtcgaggtcggtgacgtcatcctcgtcaaccgtctcgacgccaagaagggcgacaccgtggaattcccggtcgctctcgttgtggatggtgacaaggtcaccgtcaacgccaaggatctcgccaacatcagtgtcaaggctgaggttgtcaacgatgaggccaagggcccgaagatcagcatcatgaagtacaagaacaagaccggcgttgctcgtcgcaagggccatcgccagcagctgactctcgtcaagatcacggcgatcgcctgattcgcgtagggttagagtcaaggaccgaaaggaacagacatggcacataagaagggcgcgtccagctcgcgcaacggtcgcgattcaaacgcgcaatacctcggtgtgaagaagttcggcggcgaagccgtcgtggccggcaacatcatcgttcgtcagcgtggcaccaagttccacccgggcgagaacgtcggcatgggcaaggaccacaccctgttcgccctcaaggacggcagtgtgaagttcggcgtgcgtcgtgaccgcaaggtcgtcgacgtgattgccgcctgagacacgcgcaaataacgctttttgatgaaagaccgcgcccgttatggacgcggtctttctgctatgtaaggtagatacatgagtgattttgtggatcgagtgaccgtccatgtgaagggcggcgacggcggcaatggttccgccggcatccgtagggagaagtacaagccgttggccggcccgaacggcggtaacggcggcgacggcggttctgtgatcttcatggccgattcgaacgccaacagcctgctcgactaccgtttcatgccccatcgcgaggcggaaagcggcaccatgggcctgggcgacacgaaggacggttcgaagggcgccgacctgatcctgcccgtcccggtgggcacggtcgtgttcgaagccaagggaccgcagggcaagccgaagcatccgggcgagcagcttgccgacctgcgtcacgcgggagacaagttcgtcgtggccgcgggcggcaacggtggtctcggcaatgcggcgctggccaatcgcacccgtcgtgcgccgggcttcgcactgctgggcgagccgggcgaggaacgcgacgtcatcctcgaactcaagtccatcgccgacgtggcgctggtgggctttccgtccgcaggcaagtcgagcctgatcgcggcgatgagctccgccaaaccgaagatcgccgattatccgttcaccacgctcgtgccgaacctcggcgtagtggtggccggcgacatgcgctacaccatcgccgacgtgccgggcctgattccgggcgcatcccagggcaagggcctcggcctcgaattcctgcgccacatcgaacgcaccgaaatcatcgcccacgtcatcgattgcgccaccctcgaacccggccgcgacccgatgagcgactaccaggcgctcgaacacgagctcgccgaatacgccggcaagctcgaactgccgctcggcgcgattccgattcccgaacgtccgcgcatcatcatcctcaacaaggtggatgtgccggaagccaaggaactcgccgaattcgtcaagcccgaattcgaaaagctcggcctcaaggtccacatcatctccaccgcctcccacgagggcctgaaggaactcaactgggcgctggccgacctcgtgaccaacatgcgtgcggaagtcgccaaacgcgagcaggccgaggaagaggcccgcgtggtcatcaagccgctcgaggagccgcgcaatcgccgtcgccgtaacgacgaaggcggcaacgcgctcgacttcaccgtggaacgcaaggagaacggcaacggcgaagtctggtacgaggtgctcggcaccaagccggaacgttgggtcatgcagaccaacttcgataatgacgaggccgtcggctaccttgccgaccgtctggccaagctgggcgtcgaagacgagctgcgacacaagggcgccaagccgggcgacgaagtgcgcatcggccgtggcgaccgtgccgtggaattcgattgggatccgaccatcgcggccggcgcggaaatgctcgacggcacccagttgggcgcacgcggcgtcgacctgcgactgcaggaatcggatggtcgtgcgcagcgtcgttccaacacggaacgccgtcgccagtaccacgagatgatggacgcccgtcaggccgtgcgcgaagccatgatggccgaacgcaaggcaggacactgggccgatccttccgtggacgacgaccgtcacgacgaaaccagtctttttggacgtggcgagaccgccgacgacgaggatgtggaacaatagaaccatccaacgaagcccgctgatgtgccgatggcatgtcggcgggctttttcaatagccggtaacggtaccgggaggaactatgaacacgccatcgcaagcgcaagtgcgcagggccatcgccgaagcgcagaccatcgtggtgaaggtgggctccagctcgctgaccgagccgagcggccacttggatccgcaacggttgaacgcgcttgtggcggccatcgcccgcgtgcgattgatgggcggccgcgtggtgctggtctcctccggcgcgatcgcggccggtttcggcacgctcggtttcgacaagcgtccgaccgacgtagccgaccagcaggcgtgcgccgccgtcggccaaggcctgctgatggcccagtacgaggccgctttcgcacggtacgggctgcgtgtcggacagatcctcatcaccgtttccgacacgatcgccccacagcagtaccgcaacgtgcgccgtacgctcgaccgcctgctcgacttgggcgcggtgccgatcatcaacgaaaacgattccctcgcgtccaacgagatccggttcggcgacaacgaccgtctgtccgcgctcatcgccaacatcgtcgtcgccgacgcgctcgtcctgctcaccgacgtggacgcgctgtacaccgcgccgccaagcgagcccggctcgaagcgcatctcctatgtgccgaacgtcgaggacgcgctggcgaaggttcaggtcggcggaaccggctcgaacgtcggcaccggcggcatggtcaccaaaatggaggccgcgcgcgtcgccgcggtgtccggcattcccgcggtgttgacatgcgcgtcgaacgcaggtcccgcgatgatgggcgatccggtcggcaccgcgttcgcgccgatcaacgaccgcggttcgtcacgtaggctgtggatcggcttcgcctcccacccgcagggcgcgctggtggccgattccggcgcggccaaggcggtgcgcgggggagcggccagcctgctcgcggccggcgtggtggaagtgaagggcgatttcgccgccggcgacgccgtctgggttgacgacgagcagggcaaccatttggccaagggcctggtcggcttcgactccgaggagatcccgcagatgctaggacgcaatacggcccagctcaagcgtttcctcggcgaggaatacgcgcatccgctggtgcaccgcgacaatctcgtactggtctgagccagtgcaaaaggtgtggttaggccatcgatttcgcttcaagcgaagcgttcgcggcgaaatagacgtgtgtcgtggggctgtcgtttttcgcgtggcaggtctagcattacaggcatgactatggctgactggcagactctatccgaccgtatcaatcacgtggctccgagcgctactctggccgtcgattccaaggcaaaggcaatgaaagccgctggaatcgacgtcatcggattcggcgcgggcgaaccgaacttcccaaccccggcgccaatcgtcgcggccgcggccgccgcggtgcaggatccgaaaaactatcgttacacgcccacggcaggcctgccggaactgcgcaaggccatcgcggacaagacgttgcgcgattcgggttacgaaatcgacccgagccaggtcatcgtgaccaacggcggcaagcaggccgtctacgaatcgttccagatcttgctcaacgagggcgacgaggtcatcatccccaccccgtactggaccagctatccggaagccgtgaagctcgccggcggcgtgcccgtgaccgtgttcgccggcgccgaccgcaacttcgagccgagcatcgaggacatcgaggccgcgcgcaccgaacacacgaaggccatcatcgtgaacacgccgaacaacccgacgggtgcggtgtggaagccggaaaccgtcaaggccatcgcgcagtgggctatcgaacaccacgtgtgggtcatttccgacgaaatctacgaacacttgaactatgacggcgccaaaaccacgtacatcggcgccgcggttcccgaagtgcgctcccagctgctcgtgctcaacggcgtggccaaaacctacgccatgccgggctggcgcgtcggctggatgatcgcccccgtggacgtggccaaggccgcatccaaactgcagggtcacatgacctccaacgtgaacaacatctcccagcgtgctgccatcgaagccgtctccggctccctggacgccgtctacgagatgcgcgccgcattcgacaagcgccgccagaccatcgtcgccgcgttgaacgacatcgaaggcgtgaactgcccgaccccgaccggcgcgttctacgcgttcgccgacgtgaccgcgctgttgaacaagccgctcggcaccaacaagaccacgttcgccaacacgtccgaactggccgccgcgttgcttgacgaaggccatgtcgccgccgtcccgggcgaggcgttcggcgctcccggctatctgcgcttctcctacgcgcttgccgacgacgatctggtcgaaggcatgcgtcgcatgaagcgttgggtcgaggactgagccgaccggccccgcgctcaactgacggaaagttcagttgatagacgatatttttagcgattcgcgtttcggtgacatgccgggcgcgaatctttttttcgttggaaaatagcggtttcttgcgattcgtcgtgaatcgggttggacgaagtcgcgaaaacccgctattatttcgacttggcggttttgccgtctgcttcttgcgtggttttgcatagaatcctcgccggcaagtggagacggcagagttcacctagggaagtggcgcaattggtagcgcaacggtctccaaaaccgtaggttgtgggttcgagtcccgccttccctgccaagcttcttacaacaagcccagcggaggattattatggcgaaggcgaagaacagcgagaaggccattaagccgaacatcttcatgcgcattggcttgttcatcaaacagattatcgacgaactccgcaaggtcgtcactccgaccagcaaggaactgttcttctggtccctcgccgtgtttatcttcgtgctgctgctgatggcactggtcaccggcatggactacggtctgggcaagctgaccctgtggatattcggctgataaacaacttgaaggtgaaagtgcatgactgacgaagtgttttccgacaacctcgacgaggcttccaaggctgataccgaggctgctgccgctgttgaggcgctgccggccgaaggcgaggccgtccaggccgtcgccgccgatcaggcgaccgatgagcaggcccagtccgagcaggacgctccggaagagcagaccgcggaaaccactgaggatgaagacactgagcaggatgccggtgccaaggccgtcgaggaattctccaagagcctgcgcacgcttgaaggcaagtggtatgtgctgcacacctattccggctatgagaagcgcgtgaagaccaacgtcgaatcccgcgtggccagcttcggtatggaagacaagatcttccaggtcgaagtgccgatggaggaagtcgaaaagcacaccgaaaaaggcaagaaggtcatcacccgcgtgcgtgtccccggctatgtgctgatccgcatgctgccggatgagaacgcccgtcgtatcgtccgcgagaccgaaggcgtcaccggctttgtcggcccgaccaaggatccggcaccgctgacccgcaaggaagtcgtctccatgatggctccgatgatcgcttccgaagctctcaaggccgccggagacaagccggccgcagccaagaagcgcaagcttgaggtctcctacgctcctggcgatcaggtcaccgtcaccgatggaccgttcaccaccatggccgcggttgtctccgaagtggatccgtccacgcagaagctcaccgtgctcgtgtccatcttcggccgtgacacgccggtggagctaggcttcaaccaggttgaaaaattagcctgaacgtgcatgacggagcgttagctgcgttgctccaagcttgacgcaccttggtacgcctgcgcttgggcgccttgctaccgcacgcgtcacacccattcaggaacctgaaatcgtgattcttttgaaccccgcttcggcggggtttctttgtatgtattgccatacgcgcaatgtcgtggcggaatcgcataatagaaaagttgtgtctggagggtctcgtgtgcctgaacaaggcggcggcacctgctagcacagcacagcaatatacgttgcggaaggaaccggacgcgggagacctactccggtgccgttaaccaccgcttcacagaaagaagaaccatacaatggctcctaagaagaaagtctcggcgcttctcaagctccagattcaggccggcaaggccaacccggctccgccgctgggcccggctctgggttcccatggcgtgaacatcatggacttctgcaagcagtacaacgctgccacgcaggacaagatgggccaggtcatccctgttgagatcaccgtttacgaagatcgttccttcaccttcatcctgaagaccccgccggcagcagctctgctgaagaaggccgctggcatccagaagggtaccgagaacccgctgacccacaaggtcggctccgtcaccaaggctcaggtccgtgagatcgccgaaatcaagatggctgatctgtccgcacgcgacgtcgaagccggcatgaagatcatcgcgggcaccgcccgttcgatgggtatcacggttaccgactgagaggagaaggactaatggtacagcgttccaagaagtatcgcgaagcggctgagaagatcgatcgcaacaacctttacaccgccaacgaagccatcgctctcctcaagagcatgccggagtacaagttcgaccagaccgttgaggccgtgctgcgcctgaacgtggatccgcgcaaggccgaccagctggtccgcggttccgtgaacctgccgaacggcaccggtaagaccgccaaggtcctcgtcttcgcccgtggcccgaaggccaccgaagctctcgaggctggcgccgacatcgtcggtgacgacgacctcgtgcagaaggtcgccgacggtttccttgacttcgattccgtcgtcgccaccccggacatgatgggcaaggtcggccgcctcggccgcgtgctcggtccgcgtggcctcatgccgaacccgaagaccggcaccgtgaccatggacgtcaccaaggccatcaaggacatcaagggcggcaaggttgacttccgtgtcgacaagaacggcaacctgagcttcctcatcggcaagatgtccttcaccgagcaggctctggacgagaacttcaaggctgtggccgacgaagtcaagcgtctgaagccgtccaccgtgaagggccgctacgtcaccaaggcgaccatcacctccacgatgaacccgggcgtcccggttgatccggcggtcgttgcctgagtgcacagaagctaagcttcatcaaaagacccgtatctgcaatcgcagcatgcgggtcttttcatatgttcggaaagattcatgactttatgaccggatgacagatgcaacgggcgtacccagacgccacaccacccgggcagcggctcagcggtcgcgcatacggccaatcgccagcgcggtcgtcagcacatacgcgtcacgcggatcggtggcatcccagccggttgtttcggcggcacgcttcaagcggtagcgcacggtgttcggatgcacattcagctccttcgccgtgttctccaacgaactgccatacttcaggaacgtggacaccgtcagataagtgggatcatcgggattctcgccgcgcagcacctgatatacgttccgatacagttcctcacgcgcgtaatcatcacccagcagcgcacgctccggcaacagctcgtcggcacgcagcggacgggaaggagtggacagcgccggagccgcctgcagcgagaacatcgtctcacgcaacgcatgcgaagcccccgccacaccggaacggaccgggctcaaatacagtggctcgtcctcgctgaacgccggcatgaccgcggtacaggtcacctccggcgtgaccgcgcccatctggcaagccaaagccagcaggaaagtgccgtacgtgccgatgaccacatgctcgccacccaaatcgcgcaccgccttgcggatggcgagggatgtcgaggcaagactggccgaaggcaccccgccgatcgcaaaacagttgaaatcgccttgccatccgagaatgttcatcaaggagaccacacgatcgtcggtcatgttcgtcaacaggcattcgaaagccaaccgatcgatggtcgtatcgtcggtatggcctgacaaaaggtcgaggatgtctgcctgctcggagttcataaccgtccattctaatcgtcgtatctgcaaattgccgcacgttcgccgaccgttccggtccccattcgcgcagtggcggtaatatgccgactatgagcgaaaacaagaaagccggaaaagccgacacgttcctcagctggacgttgggcgtgctcgcatgcctgtgggtggcgtggtgctgcggcatcggcccgctgtactggtttggcaccggactcgccgacttcggctgggccaacgtgctgtacatggcgatcgccttcgttgtttcgtttgctatattgtggtcgctggtccgttacggccgtggcgagcgcgtgctgccgacgtatttctcacgtcgatacgtcaagctgtgtcaggaggtgtccggcacgccgacgacggtattgggcatcatgctgcatcatctgagcgacgccgcgcatagtcgtccgggacgcgccatccatgcggtgatcgtctggatcggccgcaagctgacacgttgcaccgactgctggtggaagctcatgctgctgttcgtcatcggctggctgtggattccgaccaccctgctcgccgcgtacggcgccgacatccgctcccagatccgcgaattcagttgggcgttgaaccagtggaccggactgaaacagccgtacatcggcttcttctcattcgtgccgatggacatctacccgaccgcgcactacatgtggccggccaatcccacgtatctgaccgaccagcacaacatcgtgctgaccgttttctacggtgcgttcgccgcggtctcccggtatttcaccgattccaatgacgccggcatcgtggcgctggccgcgctgcaatggctgttcgccgcgttttgttgtgcagccaccgccaatcgtttcttcaatctgccgtggcgtaggctgggcgtcggcacgttcgacttctcccatcccgaacggcacgactgctggaacatgcgcgatttcacccatcccgaggcgggtgtggtggcgcgtccgtccagactgcgcgccggcgcgaagacacgcttcgtgattctgctgttcttcatggtgtgcccgttggcggtgttcgccacgatctcactgaccaaatcgccgttgttcgcgttcgcgttcgtctggtggttcggcgtgtggtatgagctgcatatgacgcatatcaaggcgctgcccaccatcaacggcaagcccatgaaactgcgcaaacgttccttggcggcactgttcatgtcgagctgcgtcatgctgatcagcgccaaatacgcgtggtacatcattctgttcgccgcgctgctggccatcatcaacgaccgtaaacgttggaagacgtacgtggtcgcattgatgctgccgaccgtgctcatccatggcggcctcgtctatctggtgaacagcggtgccgtcatcggcggcgatccgatcgaaagccgtggcatccagctgcagcagatcgcccgcgtggcgaaatacaatccgcagggcattcccgaggacgcggccaagaaactcgctcccgtcttcaacctcgaccagatggccgaatcatacttccagcaggacgccgacccggtgaaatcgtcgggcatccagtccaagaaggtcagctacaagtggcgtaccgtcaccaaggacgacatgaaggatttcaacgacgcatggtggcagatcgtcaaggcgaatcctcagatcgcgctcgacgcgctcttcgccgaatgcttcggatacttcaacgtgaccgacctgccatacgtgtcgatggactactacgtgaacaacgattacgtgcagtccgacaacgaatggattcacctgtacaaccaccagtggcgcaaccaggtggccggtttcgccaagaaatggggacagattcccgtgcttggctgggtgacgcacggcaacctgtatgtcacgctgacactgctgatcggcgccgccgaagtggtgctgcgccgatggcggtcgctgtcatggcatctgccgttgctgctgcttatgggtgtgatgatcaccgcaccggccaacaatttcgaacggcatatgcttccgatcgcattcgtgttcggattcctgtgcctggagttctggcgcgagtcgcgtgccgcgcggcttgccgcacgcgaggcgtcgtacgttggcacgtcgacggcgggcaaacggcgtatcggcgggcaccgaatcgacagacagcagtccgacaagcaggacgccgacgaacgatatctcgatggacgacagcttgatggacgacagctcgacggacaggagaaggaatcatgacgaccatattggattccgcattgaccatgccacgcacctgcgtcgcagccgaccaggtgatcgcgctggactcagtgggctccaccaacacgtacgccgccgaattggtgcgcaaaggcgcgctgttcggctcgaccagccgagatggcctcgatggctgcgatggacgcgattggaccggccgtgaaatcgtggcgatctgcgccgacgagcagactgccggccgtggccgtctcgaccatcaatggaccagcgcggtgggggagtcgttcatcgtctccctggtggtcagcgtgcctacggcgattgtgcgggacacgtccgtcaacggctggctgcagatgatcgccggctgcgaggcgcgcaacgcgattatcgcggccatccgcgattgcggcggcccgctcggcaaggacatcgtgctcaaatggccgaacgacattttcgtcgacggcaagaaactgggcggcgtgctcgccgaaatggttccgcttgccgcaactcccatcgcggacggtacaactggtaccactgatgtggctgctgcaacggaacgcgtcggcattgtcttcggcatcggcctgaacctggccgtccccgaagaccatctgccaaccgacaaggccacgtcgctgcagctggtcgcgcatggcctgcccgattccatgacattgcgcgacatgatcgcggcccatctggtggacggtttgcgatcaaggctcgccgatttcgaagccgacccgcagcgtgaggccacgcgtgcgatggaggagatgcgtccggtctgctggacgctcggcaagccatgcgaggcgcatttcgtggacggcaccaccctgcgcggcaccgcgctggaactcaaccccgacgcctccctcaccatcagagacgacaacggcaacctgcacaccgtgcgcaccgccgacgtaggcgtcctaccccaataattctctaaccctcatccctcataaagtcgtaaagcgcttttttcgaaaatcgtacgtttcaaaaaaacgcaatattcgagaaaagcggcatttcccaaaatcgcaatatccaaaaaccgcgccacccgcaaacgcaacattcccccaaaacgaggtggggccggcggataccaacgtaagaccgtaaagactcggcctgagcggcccggagcgtgtcgcacgttggtatccgccggccccaccggacacagcgaaaacgaaaatcacagcgaaaacggaagactgtatcaaaacccggaaatcacgaagaaacccggaaatcacagcggaaattctcagcggaaaaccctcagctgaaaattcccagcaaaaagtcgtagaaaactaccgcagaaaagtcgctgccgataaaagtcactgcagctttgccagtccgctcgcgaccagcgaagccacaaccgccttgatgcaatcgcccacaatgaagcccatcgaagcgatggccaccaccggcatcgccacgcccgtaatggcggactgcacgatgaagccgagcagatagtcaagcacgatgcagccggccacgcaggcgaacagataccgtgcggcggtcaacacaacatgcttcagggaatcgacacgcgccttgcccttgagcagcgaggtgacgacggcggccggcaggaaaccgatgaggaagccggcgctcgggccgaccaaagccatggtggacgcgccgccggcgaacaccggcagaccagccgcgcccgcggccagatacatgagcaccgcggcgcccgcctgcttccacggcagcatcagcgcggccagcatgaccacgaaggtctgcagggtgatcggaaccggagtgcccggaatcggcacggcgcccgccatggaggcggcggcgagcagcacggcgaacagcgtggacttcaaaacggcgccgaatttgccgctggtggccgttttggccgcggatgagatggtcaggattgcgttgcgcatggtggaatcctcccttttttgcggatgctacaggatgctacaaaaactgacgaaaatgagtctttcgtcaatcaatgctccccatcgtagggttgctaagtttcggtaacgtttgtggagccttacaaaaagatcgcgaatcttttgtgggaaacgagttcgtcgaatcacgcctcgaccgccaaacttgacattatgcctaagaatgtcaacaaactactggtggcgaatcgcggcgaaatcgcgcttcgagtcgtgcgcaccgcacgtgagatggggattcccacggtcacggtctacgccgaacaggaccgtcacgcacagtacgtgcagatggccgatgatgcgtatctgctgtctggcgacacctacaaggacacgtatctcaacgaggatctgctcatcgacatcctgcagcgcagcggtgccgacgcggtgcaccctggctatggcttcctttccgaagtcgcaagcttcgcgcagaaggtcctcgacgccggcgccacgtgggtcggcccgaatccgaaggcgctcgtcgacctgggcgacaagatcacggcccgccgcgtggccactttcgcgaaggtgccgccggttcccggcatttcccagtcgatttccgacatgcgactgctgctcgacttcgcgcacacgcacggctatccgctgatgctcaagcgcaccgacggcggtggcggccgcggcatcactctcgtgcacaacgacgatgagctgcgtggcttctacatgaaccacgatgcgctgcagggcggcgatttggacgagtatttcgtcgaacggttcatcgacaagggccgtcacgtcgaaacgcagtgcggacgcgattcgcacggcaatttcaccgtgtattccacccgcgactgctccgtgcagcgccgcaaccagaagcttgttgaggaagctccggcgccgttcctttccgacggcgtgctcgaacagctggaaacctattcccgccgcctgttcgacgcggtcgattacgtaggacttggcacctgcgaattcatggtgaccgagcagggcaaggtctacttcctggaagtcaatccgcgtctgcaggtggaacacaccgtcagcgaagaggtctgcggccttgatttggtgcgagaacagctcaccatcgccaacggcggcgagctaaccgtcgaccacccgctgcgcggacacagcttcgaactgcgtctgacctgcgaggatccagccaagaacctcgcgccgagctccggcacgctgaccaagctcgcatggccgtccggcccgggcatccgcgtcgattccggcgtggtggaaggcgacaccgtctccccgaagttcgattcgatgatgggcaagctcgtggtcaccgcctccgaccgtgcggcagccgtggcacgtgtgcgccgcgcgttggaagagctcaaggtggaaggcgtgccgaccccggcaagcctgttcgagcagatcttcaacgacgacgagttcaccgccgagcatggcgtggcctacgacgtgagcacgaaatggctggaacgcaagtacctgaacaaggaagcatcctccaccaagggcggccagccggcatccatggccggcgcttcgggtgcgaaggaagccgagcagaaggaatccagcgaaaccttcgtcatcgaagtcaacgaccatcgtgtgtcgctgaccgtgccgaacgacatcgtggccaatctgaccggcggcgccaaggcgcgtgacgccaagcgcgccatccagccgctgcgcggacagggcctgcaccacgtcgaaaagaagcagcagggcaacgacggccagtccggtgtgatcgccagcccgatgcaggcggtcgtcacacgcatcaacgtcgccgaaggccaggacgtggccaagggcgacctgctcgtcgtgctcgaatccatgaagatggagaactacgtgtacgcgccggtcaagggcaccgtcaccaagatcttcgtcggcccggccgcaggcatcgaagcgggcgagacgttgatgaccatcgacgtcaacggcgcttccaaggcggctgacggcaagccggcaacggacggtaatacggaaaccaagacggaaggcggcgcgaaatgaccgacatcatcgcaagcccggccgtcaaagaggccgtgaaggtcgtcatggaacagcaggagcgactgggtgacgaagcggctgccgaagcccgcgaatcgcagccgatccgtacgtccgtgctgcgtgccgcgcagctcgccgccgaagccgaagaccacgcccgcggccgccagcacgtcaaaggcaagctgaccgcgcgcgaacgtctcgacctgctgcttgataccggttccttcgaggaaatcggccgtttccgcggcggcgacatcaacggtggacgcgccggctccgcagtcatcaccggcttcggcgaggtgttcggccgcaaagtggccgtctacgcgcaggacttctccgtcaaaggcggcacgcttggcgtggccgaaggccgcaagatctgccatctgatggacaaggcgctcgacctcaaggtgccgatcatcgcgctcatcgactccggtggcgcgcgcatccaggagggtgtggccgcgctgaccgaatacggccacctgttccgcaaaacctgcgacgccagcggtttcgtgccgcagctatcgctgatcctcggcccctgcgccggcggcgccgtctactgcccggccctgaccgacctgatcatcatgacccgcgagaattccaacatgttcgtcaccggtcccgacgtggtcaaagcggccaccggcgaagtgatcagcatggacgatctgggcggcggctacgtgcacaacgccacgtccggcgtggcccactacctcggcgaggacgaggcggacgcgatcgactacgcgcgtaccgtgctcgcctatctgccgtccaactccgaccagcagccgccggtctacgcgtacgcggccacccgcgccgaccgtgacgtggccaaacgcctcgccaccctcgtgccggacaacgaccgccagccgtacgacgtgctcgacgtgatccgctgcatcgtggactacggtgaattcgtgcaggtgcacgaactgttcgccgcttcagcggtggtcggcttcgcctgcatcgacggccatcccgtcggcatcgtggccaaccagccgaacgtcaacgccggcattctcgacgtcgactcatccgaaaaagtggcgcgattcgtgcgcttgtgcgacgcgttcaacctgccggtcgtcaccttggtggacaccccgggctacaagccgggcgccgaacaggaacatgcgggcatcatccgccgtggcgcgaaggtcatctacgcctacgccaacgcgcaggtgccgctcgtcaccatcatcctgcgcaaggccttcggcggcgcatacatcgtgatgggctccaaatccattggcgcggacatgaacttcgcctggccatccagccagatcgcggtgctcggcgcggccggcgcggtcaacatcatccaccgcaaggacctgcagaaagccaaagacaacggcaaggacgtcgaagcgctgcgcgccaagtacatcgccgactacgaacgcaccaccgtcaacgcgaacctttcgctggaaatgggtgagatcgacgccatgatcgaccccgaacagacacgcgagaccatcatcgaatcgctccgcctgctcgccagcaagaaacgcgtgcgccgaaccggcaaacaccacggcaaccagccgctgtgacggacgcaacgcgacgcaaccaacgtaagcaaccacaacaatcgcaagaaattttggaacaagtaaggaagattatgaacaccttttttcttgatcgactgaacagcgagccccacgcgctcgccttcgccggccaatccaccccgtggccggtggcgctcgccgaccagagcgcgaatccggcgctcgacgaggccctgcacacccatgcggccgctgcgcaggcgctgctgtacccggtgtccgccgagctgctcgccaccaccggacgcccggtcgacctgttcggcttcgaaccgaacccggcacgtctgggcgccgcagccgcggcttccgccagcgttcccggcatcgcgctgacccagctgggcgcgctgctcgacgccgccgcactcggctacaatccggcccaggccaagccggtcgcggtgctcggccactcccagggcgtgcttgccgtgcatatggtgcaggcgatctgcgaagccggttccatcgacgcagccgcagccaagatcgacgagattcttgcgatcgcaacgctgatcggcgtcgccggcacccgtcaggcacgccagctcggtctcgccgcacgccacggcgaggcgaccccgatgctgtccgtcaaggacatcacccgcgcccaggtggacgcgctgatcgaacgcgtcgacggcgcacgtggcccgatcgccgtggccgtcaccaattccgccacgcattacgtgttgtccggctatccggaggacctggccgcattcggtgtggaagtggccaaggagcacaagcgtcaggcgcagctgcgtgaggagaaggtgcgtggcggccgcgtgttcaatcccgtgctcgaatatcttgacgtgaccttgccgttccacagcccgctgatggccgatgccgtctcccaggccgtcgcatgggccgaggcctgcggcatcaacgccgaccatgcccgtgagctcgccgccgaagtgctgctcaaccatgtggattgggccgcccgcgtgcgcgccctgatgaagtccaccgatccgagcgccctgtgggtgctggacttcggtccgggcaacaccgtcggcaaactgttctccaccgtggcccaaggcaccggcgtcggcgtggtggaagcctccaccgtggccgatcgcggcgcgctctccacgcttgagaccctgccggaacgcacccagaactggacgcgtttcgcgccgagcatcatccacacgtccgccggagacaaggtgcgcaccgcgttcaccgaacttaccggcaaggctccggtgctgctggccggcatgaccccgaccaccgtggagccggagatcgtggcggctgccgccaacgccggctactgggccgagctcgcaggcggcggccaggtcaccgccagcgtgttcgaccgtcacgtggccaagctcgaggaggaactcgaggaaggccgcaccgtcgaattcaacgccatgttcatggaccgctacctgtggaacctgcagttcggctcccagcgcatcgtgccgaagaagcgcgccagcggcaccccgatcgacggcgtcgtcgtctccgcaggcattccggaattcgacgaggccgtggaactcatccacaatctcaacgccgacggcttcccgtacgtgagcttcaagccgggcaccgtcgaccagatccgccaggtggtgcgcatcgccaaggccgtcgcgccgaccaaggtgctcatcgaggtcgaaggcggctccgcaggcggccaccactcttgggaatcgcttgacgatctgctgctgagcacctacgccgaagtgcgtgaacagtccaacctcgtgctcgtggtcggcggcggcatcggcacgccggaacgcggcgccgactacatcaccggcgaatgggccgccgaatacggccgtccgctcatgccggtggacggcgtgcttgtcggcaccgccgtcatgaccgccaaggaagcccacaccagccacgaagtcaagcagatgctcgtcaacaccccgggcattccggccaagggcgatggcaacgatccgttcgccccgctgggcgagcagtgggtgccgtctggccaggccaagggcggcgtcacctccggtctgagccacctgcacgccgacatctacgagctggagaactcctccgcccgctgcggccgcctgctggtgcgcgtcatgaagcacccggaggagctggaaagccgtcgcgacgagatcatcgcggcgctgaacgccaccgccaagccgtatttcggcgatctgaagaccatgacctaccttgagtgggcccagcgtttcgccgacctctccttcccgtgggtggacgaaacctacgccgatcgcttcctgcacctgctgcagcgcatcgaagcccgcgtcaccacgcaggaaagcggcgaattcgcatcgctgttcgcttcccgcgccgacgtcgaagccgatccgaacgccgcgatcgccaagcttgccgaaacctacccgcaggccggcgagctgaccgtcaccccgatggacgaggcatggttcccggtgctcgtacgcgagtatccgaagccgatgccgttcgtgccggtcatcgacaacgacctgctgcgttggtggggccaggaccagctgtggcagtccgaggactcccgctattccgccgattccgtgcgcatcatccccggcccgatctccgtggccggcatcaccaccgtggacgagccggtggccgacatcctcggccgcttcgaagccgccatggtcaagcgcgtgtccgccgaatcggcgagcgccgacaagaccgccttcgcccagttgggcgcggccgtctccgccgaggaattcatccgcaaatccccgaacatctcctgggtcggccacctcatggccaacccggcgtacggcaccgccaacggcgacgccaactatgaaatccgcaaggtggccgttgaaggcagcgtcgaaaagtacgacctcgacatccatctcgacaccttctgggacaacgatccggacggcggcgcctccaagcacgccgtacgcgacatcgtcattccgctgaacgtcgacggcaacgaatccggcctgttcccggtcgtggaccgcgaccgtctgccggagcacgtctaccgcatgctcgccgacaccgcgggcatcggcaacaccgccatcaccggcgacaagctcaccgccatgccgcagatcgaggaagtgtccgacaagaccgccttcccgttcggccaggcgcacaccagctacacgctgtccgccaacctcggtttcgaccatgaggccgccaccggcggcgcgctgccgagcgacctcgtgccgtcccgcatcgccccggacgcgctcgtcggaccggcttggcccgccatctacgcggccctcggctccgtgtacgtcaacggcttcccggtcatcgaaggcctgctcaacgccgtgcatctcgaccacctcatcgaactcgaggtgagcgaggacgagctgctgaagcacaccggcgagcgcatcgagctcaccagctgggccgacgactacttcgaatccgcctccggccgtgtggtgaccatccacgtcacgcacaccgctcaggacggtacgctgcttgccaacgaaaccgagcgtttcgccatccgcggccgcgcgtactccgacgcgctgccgccggaagcgcccgactatggtggaatcgaagccgaaatcgaaagcactccgcgccgtctgctgcgtcgtgtgaaggtcgtcgctccgcacgagatgaccgctttcgcccgtacttccggcgatttcaacccgattcacacctcccatcgcggtgccgccgtctccggtctcgccgcgccgctcgtgcacggcatgtggctgtccgccaccgcccagtacgcggtgcaggcgctcgacgagaagggcgcgcattacgagatcgcaggctggacgtacaacatgtacggcatggtgcagctcgacgacgaggtggagatctccatcgaacgcgtcggccgtgtggcccacgccggcatggtgctggaagtgaccagccgcatcgacggcaatatcgtgtcccgtggcaccgccatcgtgcgtgcgccgaagtccgccttcgtctatccgggccagggcatccagaagcagggcatggtgctcgacgagcgtgccaagtccccggccgcacgcgaggtgtgggagcgcgccgacaaggtgacccgcgagaagctcggcttctccatcctcgccgtcgtgcgtgataatccgaaggaactgaccgccaacggcgtgacctaccgtcatccggaaggcctgctcaacctgacccagttcacgcaggtggcgctcgccaccgtggcgttcgcccagaccgctcgtctgcgcgaagccggcgcggacatctggcccgcctacttcgccggccactcgctgggcgagtacaacgcgctgagctccttcgcaggcgtgattccgctggaaaccgtgctggagctggtgttccaccgtggctccaccatgcaccacctcattccgcgtgacgagaagggccgttccaactaccgtatgggcgcgcttcgtccgaaccagttcggcgtgggcgacgacggcgtgcgcgaatacgtcgaatccgtttcgaaggcttccggcgagttcctgcagatcgtcaactacaaccttgccggacagcagtacgccgtggccggcaccatcgccggtctgaaggcgctgaaggccgattccgcccgccgcgtcgccgaatacggcggcaagccggcgttcatgctggtgccgggcatcgacgtgccgttccactccacgctgctgcgcaagggtgtgccggagttccgcgacaagcttgacgcgctgctgccgaagcacatcgactaccgtggccgtctggtcggacgttacattccgaacctggtggccgtgccgttcgagatgaccaaggaattcgccgcgaagatcctcgaggtcgtgccgtccgagcgcatcaaggccgcgttggacgatccgaaggtgtgggattcctacgccgaggacgaccagaagctcggccgtctgctgctcaccgaactgctgagctggcagttcgcctccccggtgcgttggatcgaaacccaggcgctgctgttcggttccgccgaacagggcggcctcggcgtggaggagtacgtcgaggtgggtctcggcaacgctccgacgctcgccaacctcggcgccaagacgctgcgcctgccgcagttcgccggccgtgacgtgaccgtctacaacgtcggccgcgacgaaggccgcgtctacatgaccgattccgattccctcgttgccgacgacgatgctgacgattccgccgcagccgctccggcagcagcttcggctccgtccgctgccgccgcagcgcctgccgcggtcgccgcagcacccgtcgccgcagccccggctgtcgccgcaccggccgcacctgccggcgctccgtccggcgccgcagtcgcggatattccgttcaacgcttccgacgcgatcgccatgctgctggcatattcggcgaaggtgcgtccggaccagatcggcgattccgacaccaccgacaccctgaccaacggcgtctcctctcgccgtaaccagctgcttatggacatcagctccgagctgggcgtggcttccgtggacggagccgccgaagcgaccgtcaaggcgctgagcgcgctggtcgacaaggtggctccgaactacaaggcgttcggtccggtgctgtccgacatcgtccgcgaccgtgtgcgcggcctgttcggcgccgccggcgtgaagctcggccagatcaccaagcgcgtgaccgacacctggcagctcggcgaaggctgggcctcccacgtggtcgcagcccttgtgctggaaacccgcgaaggcgccagctcccgcggtggcgacctcgcctcgctgagcaccgaagccgcttccaatgcggccgccgccaacgcgctgatcgacgcggccgtgcagaaggtcgcttccgacaagggcgtggccgtcgccatgccgagcgcaggtggcgcagccggtggcgccgtggtcgattccgcagccctggacgcgttcgcggccaaggtgaccggtgccgacggcgtgctcgcctccaccgccaagttcgtgctgaaccagctgggcgtcaccgcttcggtcgccgacgattccgccgacgagaacgccgccgtggtggccgccgtcgaagccgagctcggctccgactggccgaagcaggtcgagccgcgcttcgacgagcgcaaggccatcctgctcgacgaccgttgggcatccgcacgcgaggacctgtcccgcgcctactacgacaacgacgcctccgcactggacggcagcttcatcggcctgggcaaggccgtcgccgatgaagccgcatggtatgcgggcaagaccgctgacgccgagcttgccgccgcgttcaagcgcgtggccggcgaggcgctcgagcagacggacgaatccgccgaagcaagccgtttcgcaggcgatatcgccgtcgtgaccggcgttgccccgaactccatcgccgcacaggtcgtcaacggcctgctggccggaggcgcaaccgtcgtggccacctcgcatagcttcaggcagagcgtgaaggcatgggccaaacagacctaccgcgagcatgcggcaggcgacgccaagctgtggctcgttccggcgaacctgtccagctaccgtgacgtggacgctctcgtggcgtgggtcggcaacgtgcagaagaagacctccggcgcgaccaccacgatcctgaagcccgcctacgagccgagcctgttcttcccgttcgccgctccgccggtgcacggcacgttggccgattccggcgagctgttcgaatctcaggcgcgcctcatgctgtggggtgtggaacgcgcgatcaccggcttcgcgaagatcggcgccgacaccgacgtgcagcacaagctgcatgtgatcctgccgggctccccgaaccgtggcgtcttcggcggcgacggcgcgtacggcgaggtcaagagcgccttcgacgcgatcgtcaaccgcgcccgcgccgaaaaggtgtggtccagccgcgtcaccttcgcccatccgaagatcggctgggtgcgtggcaccggcctgatgggcggcaacgatccgctggtcgaagtcgtggaacgtcacggcctgaagacctactccaccgccgaaatcgcggtcaagctgcttgagctgtccaccaaggaatcccgcgagcaggccgtcaaggctccgctcgacgtggacctgaccggcggcctcggcagcgagccgatcgacatcaaggcactgcgcgccgaagccatggaggacgcggccaaggccgctgccgccgaagccggcgatgaggacaagcagggcgattgtgccgctgcggcaacgctgatcaaggcgctgccgagcccgcgcgccccgcgtcaggcgaaggtcgatctgaaggattggcagtacgtcaccgcccgtccggaagacgagatcgtcatcgtctccatcggcgagctgggtccgtggggctccggccgcacccgtttcgaagccgaactcggcatccactccgacggcaaggtcgacctgtccgccggcgcggtgctcgaactggcttggaacatgggcctgctgacctggaacgacagtccgaagccgggctggtacgacaccgacggcaacctggtgcccgaagaggacatcgccgaacgctaccacgacgaggtcgtggcccgctccggcgtgcgtccgttcgaagagggcatgggcaacgattacaaggacggtgccgacgaggaggaggccgaggtgttcctcgaccacgatgtgaccttctccgttccgacccgtgagatcgccgaggaatacgtcaagctcgacgaagcccacaccagctacgcggccgacgccgaatccggcgagtggaacgtcacccgccacgccggctccatgatccgcgtgcctcgccgcgcggccatgacccgcaccgtcggcggccagttcccgaagggcttcgacccggtcaagtggggcattccggcctccatggtcggcgacgtggacaagatcgccctgtggaacatcgtcaccacggtcgacgcctacctgtccgcgggcttcaccccggccgaggtcctcgaagccgtgcacccgtccatggtggcctccacgcagggcaccggcttcggcggcatggcctccatgaggaagctgtacctcgaccggttcctcaaccacgagattccgaccgacatcctgcaggaagccctgccgaacgtcgtcgcggcacacgtgatgcagtcctacatcggcggctacggcaacatgatccagccggtctccgcctgcgccaccgccgccgtctcccttgaggaaggcgccgacaagatcgccctcggcaaggccgacttcgtggtcaccggcgcgatcgacgacatcggtgtggaatccgtgatcggcttcggcaacatgaacgccaccgccaactccgaggagatgtacgccaagggcatcgacgcgcgcttcttctcccgtgccaacgaccgtcgtcgcggcggcttcgtcgaatcgcagggcggcggcaccatcctgctgacgcgcggtgacatcgcgctgaagctcggcctgccggtcgccggcgtggtcggattcgtccactcctacgccgacggcgcgcacacctccatcccggctccgggactgggcgcgctcgcagctggcatgggcggcaaggactccaagctcgtgcaagacctcgccaagctcggcgtcacgccagacgacatcgccgtggtctccaagcacgacacgtccaccaacgccaacgacccgaacgagtccgaactgcacaacacgctggcccacgccatcggccgcaccgacggcaacccgctgttcgtgatctcccagaagtcgctcaccggccatgccaagggcggtgcctgcatcttccaggtcaacggcctgacccagctgttcaagtccggcgtcgttccggcgaacgcggccctcgactgcgtcgacccgaagctcaagcgcgacgaccacatggtctggctgcgcgagccgctgaaggtcggttccgtcaaggccggtctggccacgtcgctcggtttcggccacgtctccggcttcgccgcgatcgtcaacccgggcgccttcgaggcttccgtgacgaacaccgccggcgaggacgcgctgaacgaatggcgcgaccgtgccaacgcacgtctcgccgccggccagcgtcgccttgaagagggcatgatggggcgcgccgcgctctacgagccgatcgacaaccgccgcttccacgaggacggccgcggctacgacgcgcacgaggtggagaaggccatgctgctcgatccgaacgcgcgtctcgcgtccaccggctatttcgaagcgtgagacggctacgtcgaaatctgtcctaaatatgggcaaatgatgacggcccgataagaaaagggcgatacttctgcacagatgtatcgcccttttccatatgacatggtcggggcattcccggggtaaccccgatcaataattcctaggaaggcggaggaatgctgggtctagggcatgacgtcgttgacgtgcctgcgttcaccaagcagctgaatgagccggggacgcgtatgcgcaatctgttctccatgcgcgagatatggcagacggcgcaacggtcgcagctcaagcatgatgacgaggcggtgcacctcgccgcccgctgggcaggcaaggaggcgttcctgaaagcgtggtgcgcggccatttcgcggcatgcgaaagacggcgccgaagtcgcatatccgtacacgctcgacaacttcccatgggtgcgcatcgaaattctcgacgattcccacggcgtgccgcgcgtcatactgtcctccgaagtgcaacgcaaggtgcagcagtcgttgggcctgccgttggatccggtgcgccagtcgtacgatatctccatctccataagccatgacgggccgatcgcctccgccgtggtcatgctcgaaatctgaaatgccattcccgcttgcaaaagttggtgggatgtgtataatagctcgagtcgtttcgtgtcggcttcggccgtagcggcaacacgcggatgtagctcaatggtagagcctcagtcttccaaactgattacgcgggttcgattcccgtcatccgctccacaacagcatcagagaagaagaaggcgtgcctcaaggcacgcctttcgtatatccgtatgcccgggcatacgattgcccgggtatgctggaacgggccgcggcgtgcggcggcgcaatcgcaagatatcgcaatatatacggagcggaacatgggtcagaaggaacgcaacaaggcaacggaagtcgtggatggcgtggtcgagaccgtcgacgtctccaaacacccgacggcgtccatcgaaccgtcggacctgtccttggccgacatcgaacgccgcaaatcgcatccggtccgctggattctgttcatggcattggtgctgctggccatgatcgcgccgtactggtggggtcgcgatatcgcggtgcgggacgcctcatggatggtggcgaacctgaatttcctcgatcccaaaggcgtggcgctgatttcatggacggtgaccatcgtggcgctcaccggactcggactgatggtcgcggacgcgaagaaatggctgtggggggccattttcgtgatcggccttgccgcggagcaattcgtcgccggcatgtgcctgctgagcttcaacttctggaacgccacctacgtgatgtacggtgaggcggccggactggcgaacgccgcgaatctcggcatcatcgccgccggtttcggcgtcgcggtctacgcggtgctctgggtgggcatgctggtgtgcatcaagaaggaatcgaagctcaacgttctcacacgcagctgggcctcgttcctattgttcttcgcaatcgaactcgtcgcgcttgccgtggtgttgttcggcggtctgctcacgtccatggcgtgacgtgaagaacaatcgtcgacggggggcggaaatatcggccggcgattttggtccggacgtcgtgtaagatattcccttggcgtgtttcgcccgcggatagagagcgcgccggtattgggccggcagcaccgcgcagcaatataaggaggatgccgtggcacttacggctgaggaaaagcaggaaatcatcaagacctacgcaacccacgagggtgacaccggctccccggaggtccaggttgctctgctcaccaagcgcatcgctgatctgaccgagcacctcaaggagcacaagcacgatcaccactcccgtcgtggtctgctgctgatggtcggcgaccgtcgtcgtatgcttgattacctcaagcgcgttgacatcaaccgttaccgctccctgatcgagcgtctgggtctgcgccgataacattcttccgcccgagcgtcatatggcgcccgggcgttttttgcatgacagccgagttcaaggaacagacagtttgaaggcccgaggtttggggcgcacgaggtctagaatctagagatgaggaagcggcggaggtaacgccgcgtcacgcatgtaggaatcggttggagtccgctgaagaggactgccgatagtaggtacacaagaaaagaaaacaaaggaggaaccctatggagggtcccgaaatcaaggctgttgaagccgtaatcgataatggttcattcggcaagcgcacgctgcgcttcgagaccggtcgtctcgcccagcaggcggatggtgccgtcgccgcctatcttgacgatgattcgatgattctgtccacgaccaccgccggttccagcccgaaggagaactacgacttcttcccgctgaccgtggacgtggaagagaagatgtacgcagccggcaagatcccgggctcgttcttccgccgcgaaggccgtccgagctccgaagccattctggcctgccgcatcatcgaccgtccgctgcgtccgctgttcccgcacaccctgcgcaacgaagtgcaggtcgtcgaaaccgtgctcgccgtcaacccggatgacgcatacgacgtcgtcgcactgaacgccgcttccgcctccaccatgatctccggcctgccgttcgaaggcccggtctccggcgtgcgtctggccctgatcgacggccagtgggtcgccttcccgcgctggagcgagcgcgaacgtgccgtgttcgaaatcgtggtcgccggccgcgttgtcgagaacggcgacgtcgccatcgccatgatcgaagccggtgccggcaagaacgcatggcacctcatctacgacgaaggccagaccaagccggacgaggaagtcgtcgccggcggtcttgaagccgccaagccgttcatcaaggtgatctgcgaggcccaggccgagctcaagaagatcgccgcgaaggaaaccaaggaattccagctcttcccggagtacaccgaggatctgtacaaccgcatcgacgagatcgcccacgccgacctcgacgaagccctgtccatcgccgaaaagctgccgcgccaggaccgcatccacgagatcaaggaaggcgtcaaggccaccctcgccggcgagttcaccgacatggaagacgccgagaaggacaaggaaatcggcaacgcgttcaaggagctgcagcgccagatcgtgcgccgccgcatcctgacccaggactaccgcatcgacggccgtggcctgcgtgacatccgcaccctgtccgccgaagtggacatcgtgccgcgcgtgcacggctccgcattgttccagcgtggcgaaacccagatcctgggcgtcaccaccctgaacatgctcaagatggagcagcagatcgacgcgctgtccggcccgcagtccaagcgctacatgcacaactacgaaatgccgccgtactccaccggtgagaccggccgcgtcggctccccgaagcgccgcgagatcggccatggcgccctcgccgagaaggccctcgtgccggtgctgccgagccgtgaggagttcccgtacgccatccgtcaggtctccgaggcaatcggctccaacggttccacctccatgggttccgtctgcgcctccacgctgtccctgctcgccgctggcgttccgctgaaggctccggtcgcaggcatcgccatgggcctcgtgtccggcgacgtcgacggccagcacatctacaagacgctcaccgacatcctcggcgccgaagacgccttcggcgacatggacttcaaggtggccggcacctccgaattcatcaccgccctgcagctcgacaccaagctcgacggcattccggccgacatcctggcgtccgccctgcagcaggccaaggaagcccgcaccaccatcctcgaagtcatcaacgagtgcatcgacggcccggccgagatgagcccgtacgcgccgcgcatcatcaccaccaccgttccggtggacaagatcggcgaggtcatcggaccgaagggcaagatgatcaaccagatccaggaagacaccggcgccgaaatcgccatcgaggatgacggcaccgtgtacatctcctccgaaggcggcgaggccgccgagaaggccaaggagatcatcgaccagatcgccaacccgcacgtgccggaagccggcgagacctacaacggcaaggtcgtgaagaccacctccttcggcgccttcgtgaacctgaccccgggcaccgacggtctgctgcacatctcccagatccgcaacctcgccaacggcgagcgcatcgacgccgtcgaagacgtgctcaaggaaggcgacaccgttgaggtggtcgtgcagggtgttgacgatcgcggcaagatctcgctggccatcccgggcttcgaggatcaggaatcctccgctccgcgtcgtgaccgtggcgatcgcgatgaccgccgtggcggccgtggccgtcgtgacgaccgccgtcgttccgacgatcgcgatgatcgcgattacgacgatcgtccgcgtcgccgtcgttccgaccgcgatgacgatcgtgattatgatgatcgtccgcgtcgccgtcgttccgaccgtgacgatcgcgactacgatcgtgacgaccgccgttcgtcccgttccgatcgcgatgatcgtgattatgatgatcgtccgcgtcgccgtcgttccgatcgcgatgaccgtgactacgatcgcgatgaccgccgttccgaccgtcgccgtggtagccgtcgtgacgaccgcaacccgcgttacgccgccgacgagaactacgacgagtaccgtgccgatcgcgaagagcgctccgagcgtccacgtcgccgcgtgcgccgcgactttgatccgttcgaagactgacgtcttctcacggatccttcgcagcgaagctgctcacttcacctacgagaagcccactgggcttctcgcttgacggctcagcattcgaagattgacgttttctcacggatccttcgcagcgaagccgataggtaatctaacgaaaaacccactccgtaaggggtgggtttttcgtacgttcgacatgctgtgcgaatattggcatcaatcgatttacgggtgcatggaaaaaccgacaatacaacgaaatgtgtagccctcatgcgaaaattagacaaataaacaagcaaagaagcaaggattttcacatgatattcggcattattgcactcattgtcatcgtcctgatagtgctgtggggagtgtccgcctacaacggtctggtcacattgcgcaatcgcgtcaaaaacggctgggcgcagatcgacgtgcagctcaagcagcgcgccgacctcatcccgaatctcgtggagaccgtcaaggggtacgctgcccatgaatcgcaggtgttcacacaggtgacccaggcccgcgccagcgcactccaggcggcgcagtccggtgatgtggcacagcgcatccaagccgaaaaccagctgagccgcgcgatcatgaacctccaggccgtggccgaagcgtatccgcagctgcaggccaaccagaacttcttggacctgcaggcccagctcaaggcgctcgaggagaaaatcgcctacgcccgccagttctataacgatgtggtgcagaagtacaacaccaagatcgaggtcgtgccgaccaacatcatcgccggactgttccacttcgagcaggcggcgtacttccaggtcgacgaagcggaccgtcaggctccgcaagtcaagttctgaacgtttccatacaagaaaggggagcgctgacgaggtgtgatgtcttgccagcactccctttcctgtattacggtccgttgacgccgagaccatgcgttggtgcttgaggacccttgagagaaaacagagataccgccgatgaatatcagacgtacgttggtcagtctgctgtccacgattgtggtcacgttgacgatgttgggcatcgtgctcatcaatgcgcagacctccgatgaggaacccgatttaagctaccgcacgcttgactacgacgtggcggtgcagaggaacggcgatctcaaagtcacgcagcatatcgacatgaggctgaaggaccgtggccgtgactggaagcagatgtatcagcggtatacgctgaaatccaagaatctcacggatatcagcgatattggggtcaaggacgtatccaacggcgagacataccgccagggcgacttcgtcttccccgacaatgccgacaactggaacgacgagcatgcgggacggtggtacatcgtggacgtcactgaggatgagaacgatcctcagccgttcaatccgcagaccgatgggttaagtgatgacggtcaggccgacaaaacacttgaaatcggttggaatattccacaaaccgtatccgaggacagtctcaaattcgatgtatccatgacgctgcatggcgtgagcaccgcctatgacgacgtcgtctccttccaatgggagccgttcggcgaggaaaaccagattcccatcggtacggtgacgggcaaagtcacattccccaacggcattaacggcaagaattcgtgggcatggctgcacaccaaaaatacctccaccacgaaccgcggcgataatggttccctgatgttctccgccaatgatgtgcgcgccggcgactatttggatgtcgtggccatgttcgatgcctcgcaagcgcaaggcgtggcacgcaccaagtccggcgcatacaagcaacggcttatcgacgatgaaaccaaacaggaacgggaatggaggtccagtcagcatacgaaggccgtcaaacgggtggccggctggatattcgcggcgttgatcggcatcgcgcttgctgtggcggcgctgtatttcgccatcgtcagcttccgcaaatcgcaatacaagggcgatatcgaatactggcgggacctgcctgacctaagtccagcagccgccgcgaagatggaggatatcatgagcgcatcctcctcgatattcggttccggcaagaccaagaacgccgacaaactggccaacagacagatgtccgccacggtgatgtcgcttgcctcgaaaggcgcgatcgccatctatccggggccggtggacctgtataacggcattgatttgaccacgacgagcgcggcttcggtggctggcatgctcggttccaatgcggcgtccgcgcgcaaactgaagaaaaccagcaccatcgctatcatgccggtggtgtgtgacgacatcggttcgttgctgctcagttcctccgaaagagcggtgcttgacatcctgcttaaagcgtcatcgcgtctgcatgatgcgcaggtgtttgatttgaaacagatgagcaaggccttcaaacactattcgagcggttacaagctgttggaaaccttcgacaacgcgtgctccatggaattcgatgacttacatgccgtcaagcctatgggattgctcagctatctgttcagtgggctgggtattgcgttcgccttcttcctggcgttgaaatacgtgcaggacggtgagcttgccgtggcgctggtcgtctgcgttccggtggtcgcgctttgcgctttcgccgcagcatacgggaaacgctatgtgctgaccgatgaggggcaacgctatggtgggcaagtcgccggattgaaacgctatcttacggatttcagcgatttcaccgaccgaggcgtgctcgacatgacgttgtggggccggtacatggtgtatgccaccgcgttcggcatttccaagaaggcgatggcccagctagccagagcatatcccgaagtggccgatccgcagtggttggatgagcatgccggcacctcgtacatgtacatgcccttgcgttccagcagcctgcttggcgcatccgtcggcacgtcgcttggcgcctccacgattgatccggccgcattcagcgcgaatttcggcgatctcggtgcgcagctgagttccagtttcgccgatgtgcgcagcacgatctccgcggcggccccatcctcctcatccggaggttccggaagcttcggcggttccggtggttccttctccggcggcggtttcggaggatcgtccggcggctccggcggcggttcgttcggaggccgatgaaacagacgtactggcaaacgcaccatggccgcattggccagtcgtagagagcaggaaggggtgaacaatgaacggtaaacggtacggacgcgggctaatcgccgcgttcagtgcgctggtggcggtggttgccatcatccttgcggtattcgtcatatccggcgacgaggcggacctgagctaccgctccgtcgacttcgatgcacggctccagagcaacggcgacattagattcacagagcatctggactaccagctgaagcgtcgcgaggacggcaacggtgacaccaagccgtggaaacagctgtatctgacgttcaaactgcgcaaccaagatctgacgaacatcaccgacatctccgtgaccaacgcatccacaggcgaggaatatacgcagaccgatccacaattgccatccggcatatccgacggcacatgggactcgacctatgccggccactggtacatcgccgacaccacggccggttccgactcgccgcagccgttcgatcccactaccgacggcatcgacccgaatggttccggcgagcagaagaacatcgagatcggctggaacatccccgccaccgtcaaacagagcagcctcaagttcgatgtgagcatgacgttccatgacatgggcacgcggcatagcgacgtgacgaatctcatgtgggagatgttccccgaagacaaccaggtgccggccggcgaggtcaccggcaccgtgcggttccccgaaggcatcgcctccaacaattcgtgggcgtggttgcataccgaagccacctcccagacatcgcgtgatgcggacggcacattgcatttcaccatcagcgacctgcgcaccaaccaatatgtcgacctcgtcgcggccttcgacaacacaggcgctgccggcgtcgaacgtacgcagtccggcgattatctcgacgaactgaaatccacggaggccgccaaggaacaacagtggcgcgacagccaacggttgaaggcgcagctcaccgtcgcaggctggttgatttgtctgataatcggagtgctatgctgcgtgctggcgattcgtggcgtgctgtcggcgaaccgcgaggcccgttaccaaggcggcatcgaatattggcgcgatccgccgcaggtcagccctgcggccagcgcgtatctgatcgacgtggtggacgaatccgtaggtgaccgatcatcgcgtgccatgacggcgacgatactggcgttggtggtcaagaaggcgcttgccgtctacccggggccatccagcctgtaccaaggcatcgatctgagccaagccaacgcctccgacctcgcccgcatgattgcttccgatcccaatcgagccaaggccacggcttccaccagcactctggtgatcatgccggccgcgctttcccatcgcaacaccctcggtctgagccagtccgaggaagcctgtctggaactgctgatcggcatctccatgcgcgtcggctcgccggtgttcgacttcaaccagatggacacggcctgctccgactgggaggagggctaccagtccctgaatcggttcaagagcgcctgtgacctcgaattcggagcgcttggcgcggtgaagagcgtgaacggacggtggttggtgccgagcctatgtctgatggtcatcggcgctattggtatattcgccaacggtgcgagcaatatcgcgatggcgctgtgcttgggcgtgccgttcatctgtatcggcgtcttctgcatggccgcgggccgatcggaaggcatcaccgaacgcggccagcagtatgccggcgaatgcttgggactcaaacgctatatggaagatttctccaatttctccaatcgcggagcccttgatttgacgctatggaactggtacatggtctacgcggcggcgttcggcatctccgagaaggtagcgagggaattcgcccgcgcctaccccgaagtcaacgacccgcaatggcttgacacctacggttatgactccttggactattggacctatcgttcccaggcgtggaacggtccgatcaatacgaatggcatgatgccgggtggtatgtatggcggtacgcaattcatgggcggcatcggtgacatcggttcgcagatcagctctggattcgcttcggtgagttccacgatttccgcggccgcgccttcctcatcctctggctccggcggttccttctccggcggcggcttcggcggcggtggcggaggcggcggcggtggaggcggcggtggccgctgatccacgacatgccgcccgccgtcggacaacgtgacgccctatgacattgcgattgtcggcattgtgtttgcccacgcccggtccggcctaggaagcctacctttcgcccatggcgattggtaggcttttccattggcagaacctgaacgagatgccgtccgacttggttccgacccggctccaaccggctcgcgcctgccggaagacaccactttcgaaggagaagacatgacgttgttccgtaatctcggaccgttccacaccaccgccatcggccacggtgaaatgccgctgaccatcgaaaacaatcgcggccacgacgtcggcatcgaaaccctgcacgcctcgcttgacgcaggctgccgccacatcgacaccgcatgggcctactacacgccgggagaagaggagcagaccggcgaaaaactggtgcgtgaggcgctggacacatggaaggggccgcgtgaggaagtcaccgtggcaaccaaggtcggtctgcgccgcgcatgggatggcgacaagccgatctggccgcgcgacggcaagccggaacacctcatcgaatacggcaagcagtctgcgcaggcgctcggcgtcgactcgatcgacctgctctacctgcatcgccacgatccggaagtgccgtacaacgagtcctgcgaaggcatcaaggcgctgctcgatcaaggtgtggcccagtgggcgggcgtgtccaacgtgagcatcgaacagctcaaaatcgcacaggagattctcggcgacaagctcgtggccgtgcaaaaccagtattcgccgatccatctggaaacccaggacacgttggaatactgcgcgaaggaaggtctcgccttcgtgtgctggagcccgctcggcggctaccgccacccgtacgacgagcacctgttcgacccgttccgcgaagtggctgccaagcatggcgtgagctaccagcgcgtggtgctggcttgggaactggccaagggcgaccacatgttcgtgattccgggcgcacaccgtcccgaaaccatcctcgactccctgaaggccgacgagctcgaactcaccgatgaggagctcgccttcctcggctgaaaaagcattgcccgtccgcattttgttaacccaaccactcagctcgggtagcaaaacacggacgggcatacgtttttgcggaaccggccggccatcgcgggattacagcatggccatcgcgaaatcaatcagcagtttgacgccgtacagcaccaccactgcgccacacacgcggttcatcgcggtgacgattcgtgggctgaacctgtggctgaacagcgacaccagcagggtgatgccgaagaaccacagtgccgacgcggtttccacgccggtgatgaacggcgtggactgaccgacggtaagcgtcgcgctgaacgcgccgagcatcagcgtgccgtcgatgatggcctgcggattgcaccacgtcaccacaccggcggtgacgatggtgtgcagcagctcgctgtcgccgccgaatttcgaagtgacgcgttgcgcaaagccctgcgattgcgaggtccgcgactgcggcgtttgcgcggcgccatcatcgccacccttgccgggaaacagcagacccgcgccgatacggatgaccaccaagccgccgatcgccagaatggccagcttcagccatgcgtaatcctgcatcagcctgccgatgccgaaaaagcaggacagcgacaacgacacgtcgaaaaacagcacgatcaacgcggtcagcagcgcacggcggcgcggcttggtcagcgccgaatcgatgacgaacagattctgcataccgatcggcgccacatacgccaatcccaacgtcagcccttggaaaaagaatcccatactcgcctcttatccatccaaacatatttggttggttgtaatcaacccagccaaaaccaaccaaatcgctcattctgtaatcgcaggaaaaacctctattctgcgaaaaacaacgtaaccagtgtcatattgtataggtgttgctacaataggcaaccagccaaaagctgaggtttggctcagccaatcgcaggacggtccactgtcagaaaccagatgcgccgaccacggaaaacgccgaaccataccgacaccaccaatgtgaaggagcgtcatggcacgcatcgcgccgctgaacatcgattggaaaccggaccgtaccaccggcgaacccgtcaccgaacaaatcgtcggatacatgtgcgaacaggtgcacagcggcaactggccgattggctcgcgtctgccgtcgcaacgcgcgctcgccgaatggttcggcgtgaaccggtccaccgtcatcgcggccatcaacgagctgtccgactacggcatcgtcgaagggcagcatggagcgggcacgcgaatcgtcagcaacacgtggtcgctgatgctgccgggcgcgcccgactgggccgattacgtggattccggcttcttcaaagccaacaacgacaccatccaagccatcaaccggtacgagttcacgccgaacatgacgcgcatcggcaccggcgagctcgacccgcggctctttccgaaagccatgtggcggcaggtgctcggcgaggcggcggacgagatcgaaacgctcggctacccgccgcccgaaggcctgcccgaactgcgcgaggccatcgcggcgcacatgcgcgccaccggcgtcgactgcacggcaagccaggtgctggtcacatccggcgcgttgcaggcgctgcagatgatttcggtgagcctgctgccggccggcaccaccgtatacgcggaatcgccgagctacatcaagtcgctgcaggtgttccagtcggccggcatgcatctggaaggcgtgccgatggacgacgacggcctcaacgtgcaggcattgcgcggcctgctggcggaaggggagcttgacaccggccgtccggcgccgctcaacgcgcgcaaccgcaaaggcaatgcgatcctgtacacgattccgaccaatcacaatccgacaggcgtcaccatgagcgacaaacgccggcatgaactggtcgagctttccgtggatagtcgactgccgatcatcgaggacggcgcctaccgcgacctgtatttcgaggatgatgccccgctgccgtcgctgaaggccctcgatgagaccggcatggtcatcacgctcggcagcgcgtccaagtcgctggctcccggactgcgcatcggatggctggtcgccgccgaaccgatcgtgcagcggctcgccgacgtgaaaatgcagatggactacggtgcgagcgtgctgagccagtggacgttcgcgcgattcctcacgaacggcatgtacgacgaatacgtggccggcctgaaacgggagctgcggcaccgccgcgaccgcgcgctcgttacgctgcaggagaaaatggacgggctcgcccactggaacgtgccgtccggcggcttctacatttggatgaccttcgaccggccgatacgcatgaaccgcctgttccagctggccgccgaacgtggcgtgctgctcaaccccggcgacatctacgatttcgcagccgacaactccctgcgcctgagctactcctacaccacgccggaagagttcgccgacgccgtggacgtactcgccgccgtcgcacgcgagctggcgtagcgcctggcgtagcccgagcttgcgtaacggctggacgggctttgcctgtcccgtgaatctacgacaatatctgatggtcttttacgagtaagaggaacatccgtgcaaagaagaaacaagccagaagtgttggcccccgcaggcaatttgaggggactgaaaaccgcggtcgattacggtgcggacgccgtctactgcggcggcaaggcgttcggcatgcgcagcgcgccgaaaaacctgagcctcgaggatttcgaggaaggcgcacgctacgcccacgagcgtggagcccgcgtgtacgtcaccttcaacgtgctgccgcgcaacaacgaggtggaagccatgcgcgaatacctcggcaaattgaaggacaccggtgtggacgcgctgatcgtctccgacatcggcgtgatgctcatggccaagcaggtggctccgaacctcgaactgcatgtgagcacgcaggccggcgtcaccaactaccaggccgccaacgcgttctacgaactgggcgcgcgccgcgtggtgctggcccgcgaaatggacctgcaggccgtgcgcgacatccgcgcccgcatccccgacgacctcgacatcgaatgcttcgtgcacggcgcgatgtgcatggccttctccggacgctgcctgttttccaactatctgaccggccgcgacggcaaccacggcgaatgcgcgcagccgtgccgctggaagtattcgatcgtcgaagagaaacgccccggccagtacttcccgatcgaacagaccgcggaaggcgcgtacctgttcaattcgcaggacatgaacatgctcgcccacatcgacgatctgctcgattcgggcgcgacgagcctcaagatcgaaggccgttccaagagcgcctactacatcgccgccatgacgaacgcctacaagacggccgtcaacgaatacatggtccagcgtggcttcgaagatgccgacggcaatgtgctgaagccgttccgcgaccgcgtgatccgtcccggtgacccggaatacggcaagccggacaccgaggatgcgatcatgtccaatgccgatggcgcgttcgcaggcaagcccgacatcgacgccgttcccgttgggggcgtgccgtccggcaacgtttcggctggcaacgtttcgtccggcaatatcgcgattggcgagccggacaatctgagctaccacgcacgcagcacccgacgcaagtcgaacaccgccgccgaaatactgccggaaggctggcatcacgccggtgtacgaccggcaccgcatgtcaccctgccggattggctgctcgacgagcccgacaaagtggcgcaccgcgactactccaccggcttctactatccggaacacaaagtgcggcaaagcaccgaccgttccgcatacttccgcgcatggctcgtcgtcggcgaagtgctgtcctggagcccggaagacggaggccgcgtgaccatcatgagccgcaacaaaatcgaagccggccaggaagtcgaattcgtgctgcccggcgcggcccccttcgcctacaccgtgcctgccggcggtttccgtgacgccgacggccactgggtcgaagccatcaacaaccccgcgcacgtcttctccatgccgtgcccacaggaggtgcccgtcaacgcggccatccgctcgcgcacgaaaaagccgacgctgaaagccgaatagaagacggcaatcgcaagcaggccttccaatcgcaaaaccaaggaaaaacaagacatgagcagcacacaatacgatgacgcgatcctcgattccaacgccatcgaccccactgacaaaaacggcaacccgattcccgtgaccattccgatcatgctggcccccggcatcaaagtcgtctacaccacgcgactcggcggcaccagcgaaggcgatttcgcgcacttcaacctcggcggcaaatccggcgacaagccggaacacgtgctcgccaaccgcaaggcgctcgccgacgtgctcggcgcgaaaatcagcctcatcagccaggtgcattccggcgacgcggtggacgtggacgaatcattcgtcatcaaccagccgttcggattcgacgtgtccggcacgaagaagccggaagacgagacggacggcgaaaacaacgcgacggggaatgacggtgagccgaccgtcatcgaagccgacggccaagtgacgtcccggaagaacgtggcgctcggcatgttcgccgccgactgcctgccggtgctcatggccgatcccaaagccggcgtgatcggcgcagcgcactgcggccgtcgcggtctgcagaaaggcgtgatcggcgcgaccatcgagaagatggtggccaagggcgcccagccggaacgtatcgtcgccacgctcggcccctgcatctgcggcgactgctacgaggtcggcggcgacatcgccgacgaattcgatgcgcagttcccgggaaccttcacgttgagccgatttggccagccgggcatcgacatcgccgcggccgccctgcaggagcttgccaaagcgggcgtgccggccgacaacatcgtctcatcccgtccacgcgtcaacgcggccacgcagtacctgtccgaagacgaggaactggccggcatctgcgccgccgatggcgaaggcgatccgaagctttccgaacggttcaacaagatccgccgcagcctgtgcacgctcgaaaacccgttgtggttctcgcatcgccgcgcgtcgctcgccaaaaaacagcatgaaggacgcatgctggcgctgatcgtacgcgaataatcaccatacgagccatacaagccacgcgattcgagtgattcgcgtggccactgttgcggattgcgtgcagaacccgccgcggaacggggtggcatgcggccgcggctttacggtggagcatatgagtaagggagagcagatgcaggaacagaagatgccggtcgtggccgtggtgctggcagcgggattcggcacccgattcgacgagaacaaccccaagcagctggtgtcggtgggcggcaagccaatcgtctgctggagcatcgaggcattcgaaaacaacgaccgcatcagcgacatcatcgtggtggtcaacgaacgtgtcgaagagacggtgaacgagcttatcgacgaagccggttacgccaaagtgcgggccatcgttcccggcggcgccgaacgcgtggacagcacgctcgccgccctggacctgctcaaacaggccggcattccctccggcgcgaaaatcctcatccatgacggcgtgcgtccgttcgtcgaggagcggtccatcgacggctgcatcgacagcttggaccagttcaacgccgccaccgtggcctacgcctccaccgacacgattctgctcacagaggatctgggcgaccgcaaggtggtcaaatccgtgccggaacgtccgaacaccttccgcgcgcagaccccgcaggcgttccgtttcggcaccatcgtcaaagcctacgaactggccgccgccgaccccgacttccacccgaccgacgacacgcgcgtggtggtggactacctgcccgacgagccggtcgccatcgtggaaggttccgaaacgaacctcaaaatcaccacgccatccgacatgccgatcgccgaaggcatcgcccgcagcctcgaccccgaacacgccaaggaggaagccaaggcgcgcatgcacgccgtgttcgccgaggcgttctcccagatgcacagccgttgattttcatcgaacgttaagtccgtcgacgtgtcggcagacttaacgttcaacacattcaccacgtacactggaaaccatgcagcagatcaacatcgtcatctccggtttcacgccctatgaaggcatcgacgtcaatccggccgtgctcgtgccggcggcggtagccaagcaatgggccgatccggcgcaatcgcaggcgatctccgaagaactgctgcaggacatcgccgtcaccgtcaccaacgtcacgcttccggtgagcttcgccaaagcctggcccacgctgctggaagccatcgaacaggccaagccggacatcgtcatcgccacagggctcaagcgcacctcccgtggcattctgctggaacgatgcgccacaaatctcatggatgcggccaagccggatgccgacaacgtgattccgctccgccgcccgatcgacccggaaggtccggctgcgtactggacgcgcctgccgttgcggtcgatactgcacgatttcgccaaacacgagattcccgccgcgttgagttccgacgccggtacgttcgtatgcaattcgctgttctatcatctgctcaactggtcggcgggccaggaacgtcgcattctgtcggggttcgtcagcctgccgatcgtcaacggtcggccgcacgaacgtggactgtcgatcgaacagcagaccgctgcggtcgatgacgtgctgcgtgaatcggtacgatacttcctgcaaccctcgtcaagcgacattctgcttggctgaggacggctccgctttctacggcacgattttctgcgacatgtgagtcatgcggtttcgacacgtggtcgcggacataccgccatacccccgacggactttttcgaacgatttctgtgctctctgtgagaataatgcatttcgttctgcgtgccgcctgctgactgagatagagtactgaacgagtgcgcgctggcagatgcgcaaagtgtagggaattcgtgaaaggaaaagggcatggttgagcagttcccaatcgtgttgagggggtacgacaaggatcgagtcgacgaggcgttcgcttcggctcaggagacggtgaaccgtctgcgtgagcaggtcaaggccgacgaccagaccatccttgagctgcaggcgcagctgcaggaggaaaagaacaagaaggccgctccgaagtccttcgcgtcactgggcgccaacgcccagcagatgctcgccagcgcggaacagaccagcgccgagctgcttgaacgagccaagaaggacgcttccgcggcccgcgccacggtgcagctgcaggctgaaacactgctgaacaacgccaaaatcgacgccaagcgcatcatggacgacgccaacgccaaggcggccaaggtgctcggtgacgccaaggacgaatccgaagccatgagggccaatgcccagcatgaggtcgaccagatgcgcagcgaggcccagaaggccgtggtggcgcagcgtcagaccgtcgatctggaactgaccaactcccgtgaggaacacggcaagcgtcttgccgccgaacgcgccacgcaggaacgtgagatttccgacatgcgcaccgaggcgaccagcaagatcgccgaacagcgcaagaacgccaatgaggagatctcccgcctgaagagcgagaccaacgaccagatcgaatccgcgcttgccgaagccaacaagaagctggcggacgtgcgcgagcaggtgtccaagatgatgaccgacgcgcagcgccgtgccgccgaaatcaccgacaccgccaaggcgaaggcccaggagatcactgatgaggcggaagtgcaccgcaccaagaccatcagccaggtcaacgccgaagtggagcagatccgcgccgacatctccgcccagcaggaggaggccacgaagaaggtcaatgagctgctcaccgacctgaacgaacgtcgcgaggccgccaacaagcaggccagcgagttgatttcctccgcgcagaagacccgtgacgaggctgaggcgtacgcttccagcaagcgtgacgaggcggacgcgaacgcggcaagcatcctcaagcaggccaccgaagacgccgacgagcagatcaacgagcgtcgcgaggccgcgaagaaggaactggacggcgtgcagcagcgcatcgccgacctgcagagccgtgaggcccagatcacgcagcgcgtcagcgaactgcgtgccatgttctccaacgcgttctccggtttcggcatgaacgacctgtccgtggtcaacgccgtcgatgaaggcgagccttccgacgcgcaatctgatgacgacgcgcagcacgacgatgagaccgccgcaccggcagacgccgacacgcaggatgccgtcgagaacgattccgcagccgagaccgagccggaaggcgacgccgaatccgcagacgctttgcagaacaactgaaaccatagaaagggaatggataatgaccgacatcacgccattgagcggtgatgaactgaacaagctcgtcgacgatttcgaagcaagcgagcacaatcgcatggccatgaacgccgtcacggcggccggcatcgacaaggtggcgcgcaactacgatcgcgcccgtctgatgcagcgtcgtttctccaccgtcgtggacaacggcaccgtcacccatcaggaccgttccggccgttgctggctgttcagctcgctgaacgtggcccgtttcgtggccaagcagaacatgggtcttaaggagttcgagttctcccagaactacgccatgtactacgacaagcttgaacgcgtcaactacttcctgaaggacgtggcggctctggtagaggccggcgagcctgccgattcgcgtctgatgcagcatctgctgtccgacgtgatgggcgacggcggccagtggaccatggccatgaacgtgtacaagaagtatggcgcggtgccgaaggatctgttcccggagaccgaatcctccaagaacaccggtgagatgaacgtgcagctgcgccgcatgctgcacaccgcggttgcgcatatgtacgctgatccgtccgcgatcgatgcgatcatcgccgatgcggtcgccgccggtcaccgtattctgacgattcacttgggcgagccgccgaagagcttcgattgggagtggaccgacaaggatggcgagttccaccgcgatggcgagatcacgcctgtcgagttctggaagaagtatgtgggttccgccgatttggaaagctatgtctgcctggtggacgatccgcgtcaggagcacgtcaagggcaagaagatcggcatcgagcatctgggcaacgtggccgggggagacccgaccgagtacctcaacgtgccgaaccagttcatgaaggactgcgtgcgtcagattcttcaggaacagggcattccggtatggttcggcgctgactgccatccgatgatggaccgtgagaatggcgcgtgggccaccgacctgttcgagtatggccgcgtgtatggcgtcgatttcgatctggacaaggaacagcgtgtccgtttcggcgattccgcgatgaatcacgcgatggcgttcgtcggtgtggatgtggatgaggatggccacaccacccgccgttggcgtgtggagaactcgtggggagacaagatcgccgacaagggctacttcaccatgagcgacgactggttcaccgaatacgtctacgaggtcgccgtccccaaggccctccttcccgccgaatacctcaaggccctagaagaacccgccaccatgctccccgcgtgggatccgatgggcgcattggccaaatagcgcgcggagcgcgcgctggccaatacgcgccgagcgaatagcggaagcccggtgggcttccgccgcgagggaaaacgccgacaggcgttttcgaggctgcaggcctcatcgcctcagcccggcaggccccatgacgcacgtttcccccaaaaaaagacccaacccggactctccgtccgcgttgggtctttcctatatcgctttcttcgtcccacgtccccccccacccattccaccatgcagtcgcccatccccatattccgtccccatccgttaaggtaacgacggtggcgctatcgcgctacgcaagcataatgatgcaggggaggaacagaagcgatggcaggtcttcgcggtccggatagttcgaaggatgcacagctgttggatgagcgcgccgtgtttccggagaccgtggatgtcaatattcgtcagcttgacccgattcccgctccccgatattttcttaaggaacttccgctcacgaacgagatgagcgatctggtgttgaagtcccgtcaggagattcgtgacgtgctgcatggccgtgacgatcgtctgctggccatcgtcggcccgtgttcgattcatgatccgaaggctgcgcacgagtatgcggagaggcttgccgccgtcaagaaggagcttgatgatcgtctggtcatcgtcatgcgcgtgtatttcgagaagccgcgcaccacgatcggttggaagggtctgatcaacgatcctgatcttgacggccagttcaatattcgcaagggcatgttcatggctcgcaaggtgcttaccgacgtgctggggctcggcttgcccgccgctacggaatggcttgatccgattaccccgcagtatatttgcgatctgatcagctggggcgctattggcgcgcgtaatacggaaagccaggtgcaccgcgagctggcgtccggcatgtccatgccgatcggtttcaagaacgctacggatggttccatcaagccggcggccgattcgtgtttcgcggccgctttcgagcatcatttcctctccatcaatctggatggtcgtgtgatttccgcggagaccaagggcaatcccgactgccatctggtgctgcgtggttcctcgcatggtccgaactacgatgccgcttccgtggcccaagcgttggcggatctcaaggcttccaaggcttccggaccaagcgagcatggtctgatcatcgatgccgcgcacggcaactgcggcaagaacgaggtgcgcgaggccgaagtggtcgaagaaatcgccgcacgcgtcgcggccggcgaacagggcattctcggcatcatgatggaaagcttcctcaaggcgggcaatcagaagcccgcgccgctcgaccagctggaatacggcaagtcgatcaccgacgcatgcgtgccgtgggatcgtaccgagcagctgctgcacacgcttgccgacgcggtcgacgcgcgtcgcaagcttggctgatgtttctgcaccatcgttgctatccttgggaaaggaagcgacaaggagagcgagatcatgcagcagcagctgaacacgcctgaggatttacgtgccattaggcaggccatggatgagggcaagaatccgctggtggagaccgacgtgccgcgctgggaggaccaggtgggcatcagccgcatcgtgaaccgccgcgtgctggaattcgaagtgttgcccacgccggcgcaggtgctgggcgacctgccgttgagcgagcaggcgcaggagatcgtcgcctattcgcgtgatgagattcgtgcctgcctgtacggtcaggacgatcgcctgctggtggttgtcggtccgtgttccgttcacgatccgaaggccgcgctcgattacgcgcgtcgcctgtccgcgttgaaaggcgagttggatggcgagctgctgatcgtcatgcgcgtgtatttcgagaagccgcgcaccacggtcggttggaagggtctgatcaacgatccggatatcgacggcagctgcaatatcaggaagggcttgctgttggcccgccgcacgctgcttggcgtgcttgacgagggtttggcggcggccacggagtttttggagccgaccagtccgcagtatatttccgacgcgattagctggggtgcgatcggcgcgcgcaatacggaaagccaggtgcaccggcagttggcgtccggcctgtccatgccgatcggcttcaagaacgccacggacggttccatcaaggctccggccgattcctgcttcgcttccgcacaacagcacacgttcttcggcatcgaccatctcggccgcgccgccgtggtcaaaacgctcggcaatcccgactgccatgtggtgttgcgtggttcctcgcacggcccgaattacgatgccgcttcggtggccaaggccatggacaccatccgcgccgaaatgccggccgattccgctgcggcacatgggctgatcgtcgactgctcgcatggcaactccggcaaggacgagcatcgtcaggcgcaggtggtgcgtgacatcgcgggccgtatcgccaaaggcgagcagggcatcaccggcatcatgatggaaagtttcatcgaaggcggcaaccagaaggccgcgccgctcgaccagctcgtctacggcaagtccatcaccgacaaatgtctgagctggaacaccacggaacagctgctacgcgagcttgcccatgcggtggccgtgcgccgctggaagtgaccgattcgattcactatccgcgcgattgcagaaaattcgggaaacgcgaatcgcaatcgcgtaaaacaacactcaagacagcacgtaagacagggagggtgcaatgaccgcaatcgccatcatcggcgccatggatgaggaagtcgccaatatcgcaacggcactgagcaacgtcaccgtcaccgaggaagccggcgtcaaggtgacgcgcggcaccctcgaaaccaacaagggcaccgccgtcaacgtcgccgcgaccgtcggcggcatgggcaccgtcaacatcgccgccaccacgcagcatctgatcgacgctgaccagccggacgccgtgatcttctccggcatcgcgggcaatctcaacacgaatctgcacatcaacgacgtggtgctcggcggcaccctgcgctatctcgacaccgacatgcgattggtgggccagttcaagcccggcaccgccgaccggcccatcgaggaataccatagcgacgaccgtctgctcgaactggccgaccaggcgctgaacgacttgaacattcaccatatcgtcggcatcatcgccaccggcaactatttcgtcgatgatccgcagaaggtcgagcaggtgatccgtgagaccggcgcggacgcggtggaaatggaaggcgccgccgtcgcgcatgtcgccgcccgcaacgacgttcccgcattggtgattcgcgcgctgagcgacaacgcggacaccgactacgaggatttcaaaacgttcgacatttccgaatacgcggacaccgccgcgaaactgacggtgaacatcgccaaacgcatgtagcgttcatgtggcgttgcgaaacgcctaacgttgcgaaaagccgtttccacatcccgtttgccgcatgacccgtcatcatgcatcgtcatatcggcaaacgggacgtctcatattccgatatgctgcgtttcggaagatgaacgacaggaaaacttccggtggcgtgagagcatcgcatacgcgaaagcctctccgaaaccgctagtcttaaggaagaactgaggattatcggaaggtgaacgcatgacgttggagcagatgctggcaacgccgtcggtggttgcggcattggtggtcgtggccgtggtcgtgttcgtcgtggcgttcctgcttggccgcagacaaggcttccaggatgtgcaggacggcgtcgaccccaatgatccgagcctgttcggagctgcgaagaacacgtccctgttcggcccccgcgttcccgtgcagtccacggaacgccagctggtggccgtcatgcccgaagctttggtggtcgtagactcgctggccacggtccaatacgcatccccggccgcgcggcgcttcggcatcatccacgaccaggcgatggcgctcgcggaaatccgcgacatcgtgaaactggtctccacggacagcgtggtgcgcgaacgcgaactgaccatccccctgcacggccgcacgcgaacgggcgtggtgaacacgaacggcaaaggcgtcgaagccggcaagccgctgcccgaagacacgctctacctgcacgtgcgcgtcggacagatcgccgacaacctatttgcgattttcatttccgacatgagcgagcaacgccgtttcgaaatcatgcggcgcgatttcgtcaccaacgtctcgcacgaactgaaaaccccggcaggcgcgatttctctgctcgccgaaacgatcggcgacgcggccgacgatccggacgcggtgaaatacttctccggccgaatctccaaggaatccgaacgattgacggaactggtccaccgtctgatcgacctgcagaaagcgcaaagcgcggcagcgatgctcaacgcggaacggctgtccgtgctgtccgtggcacgcgaggcgctcgccgaaaaccaggtcaaggccgaatcgaagcacatcagcctggtcctgtccgtgaacggccggcaggtgctggtgcatgcgaacgccgaggaactggccaaggaagccgaacagaacctggacgtgttcgtggtcgctgaccatgagaccatcaaaactgcggtgaagaacctggtggagaacgccatcaactattcgccggaacataccacggtggccgtcggcatcggcatcgaatccggcaaggtggcgattcgcgtcgtggaccagggcatcggcatccccgcggcgtcgctcagcagaattttcgagcgattctaccgcgtcgatccggcgcgctcccgggaaaccggcggcaccggcctgggattggccatcaccaagcattgcgtcgaggattgcggcggcaccatctccgtatggtcgcgtgagggggaggaatccaccttcaccatcacgatgccgcaggcttcgcgcgctgcggaacccgaccatccggcggattcggcgaatgataacacccgtgaaaagaaacagtccggccactccaccacaacagagaatgaggagaaccactgatgacgcgaattctgatcgtcgaggacgaagagtcgtaccgtgagccgctggtctaccagctcacccgtgaagggtacgacgtgtccgccgcggccaccggtgaagaaggattggaactgttcaccaagggtggtatcgatctggtgctgctcgatctgatgctgcccggtcttgacggcaccgcgctgtgccgtcggatccgcgagcaaagccgtgtgccgatcatcatgctgaccgcgaaaagcgcggaaatcgacaaggtcgtcggccttgaaatcggcgcggacgactacatcaccaaaccgtattccttccgtgagctgctggcacgcatccgcgcggtgctgcgccgcaaccagatggtcgccgaatccggagaagccgccgacgacgatattccgctcgtatgcggtgacatttccatgagaatcggccagcatgaggtgacggtccgcggcgagaacgtgttcttcccgctgaaggaattcgaactgctggaatacctcatgcagaacaagggccgcgtgatgacccgccaccagctgatcgaccgcatctggggctccgactatgtcggcgacaccaagacgctggacgtgcatgtcaagcgcgtgcgcgccaaaatcgaggaggacccgggccatcccaagtatctgaccaccgtgcgcggcctcggatacaagatcgatacgccaagcgaatgatgatgaaaggcttggtatagcgcgcattcgcatcgtgcttgcaaagaacggtgaacggaaggaacgtcgaacggcgaaggtgtcgtagactgttcatcttccgttcaccgtttttggtttggggcgagtgaaacgcccaataggctggagattgtcatgaagaacgatggcgacaacagaaaatcgaaaaatcagaaacacacgccatctgaatgttgacagagggaaaagaataatgcgtaactccattctcgtacgctccatcgccgctgtgtccggcattgtgatgctggcttccgtcgcggcttgcggtgacaacaccaccgcttccaccgattcttcggccaagtccgataccaagaccgaaaccgtttccggcaacttctccggcgctggcgcttcttcccagcaggccgccgtcgaagcttggatcgccggcttccagggcaccaacccggacgccaaggtcgcttacaacccgtccggttccggcgctggcgtgtccaccttcctgaccggtgcaaccgcatgggccggctccgacgctgctctcgccgataacgaggtcgagcagtccaagagcgtgtgcgcttccggcaccgccttcgacatcccggtctacatttccccgatcgccgtcgtcttcaacctgcagggcgtgtccggcaagggcaagaccctgaacatggacgccgagaccatcgccaagatcttcgacggcaagatcaccaagtggaacgatgacgccatcaagaagcagaacccgaaggtcgatctacctgacctcgacatcaccgtggtgcaccgttccgacaagtccggcaccaccaagaacttcctgagctacgtcaaggacgccgctggcgacgcatggagctacgacctcggcgagaactggccgaacgaggtcggccagggcgccaagggcacttccggcgtgatctccaccgtgcagcaggctgacggcaccatcggttacgccgatgcctcccaggccggcgatctgggcaccgtggccgtgaaggtcggcgacgattacgtcccgttctccgctgaagccgccgccaaggtcgtggacgcctccccgctcgacgattccgccaagggtgacaaccgcgtggtcgtcaagctcgaccacaacaccaccgagaagggcgcctacccgatcgtgctggtctcctacgacgtcgcctgcccggcatacaaggacgccaacaccgccaagttcgtcaagtcctggctcacctacgtgaccagcgacgaaggccagcagaccgccgcttccgcagccggctccgctccgatgtccaacaccctgcgtcagaaggtcgtcaagtccatcgacgccatcaaaaccaagtgagcccatcacagtggggcgatcgctttcggtgatcggtgactgaccgtaggtttcaggccgcagccgcgtaaaaaacggctgcggcctgaaacgatacctacggacgatacgcaaaaccagaaaaatcgaaagcaatcgcaagcaaaccaaaaggagaacccgtgagttcgcaaagcaaaacggcacagcagccggtgagcggcaagaacgcggataaggtgttcaagggcgtggcctacgcctgcggcatcctgatcctcgtcgtgctcgccgcggtcgcgctgttcctgctgttccgcgcgtggccgttgatcggcggtgaccagaaggccaacagcgcgaccatcagcaacttcaccggcggcaaggcttccagcttctggggctacgtcggaccgctgctgttcggtaccgtgctgatttccgccctggcactgctgatttccttcttcgtgtcggtcggcatcgcactgttcatctcgcattacgcgccgaagaagctcgccaccgccctgagctatgtggtcgatctgctcgccgccatcccgtctgttatctacggtctgtggggcggtctggtgctggtgcccgccatctacccgttctggaattgggtggccaaataccttggctggattccgattttcgccggtcccgccgccaatccctcccgtaccgtggccaccgtgtccgtggtgctggccgtcatgatcctgccgatcattacctccatgtcccgcgacatcttcctgcagacccctcgccttcaggaagaggcggctctggccctcggcgccacgaagtgggaaatggtcaagctcgcggtcctgccgttcggcaagtccggcgtcgtgtccgcctccatgctcggcctcggtcgtgcgctcggcgagacgatggccgtgctcatgatcctgtccccgggcctcaactactccgtcaagctgctgcaggcctcgcagaaccagaccatcgccgcgaacatcgccgcgcagtatccggaagccaacgatctgggtgtttccgtgctgatcggcaccggcctggtcctgttcctgattaccttcgtggtgaacttcatcgctcgtaagctcaccgagaaagcgagtgtgtgatgaccgccgcaaataacgacgcttcgccgatggacggcgctcccgtcatcgacttcgacaagttcaagccgacccgttccttcacctcagcgcgcaagcgcaaggacttcgccatgaaggcgctcatctcgtgcgcgttcatcgtggcgttgatcccgctgttctcggtgctgctcaccaccatcatcaacggcgtcaagaggctgaacctcaacttcctgagctacaacatgaccggcgtggtcggcggcaacccgaccccgtccggcggctacggcggcatcctgcacgccatcatcggcacgctggaaatcaccttcggcgccatgctcatctccatcccgatcggcctgatgtgcgccgtgtacctggtggaatattccaaccgtggcaagctggcacaggtcatcaccctgctggtcgacgtgatgagcggcatcccgtccatcgtcgcaggcctgttcgccttctcgatgttcacgattctgatcggccccggcaccatcaacggtttcgaaggctccgtcgcactttccctgctgatgctgccgaccgtggtcaagtcgtccgaggaaatgctcaagatcgtgccgcacgatttgcgcgaggcctcgtacgccctgggcgtcacgaagcagcgcacgatcacgaagatcgtgctgcgcaccgccctgccgggcatcgtttcgggtgcgattctcgccgtcgcccgcgtgatcggtgaaaccgctccgttgctgatgaccgcaggctacatcgcctccacgaacgtcaacctcttctccggccagatgaccacgcttccggtgtacgtctaccaggagtattccaagctcaacgcgaactgcccggccaacgcttccgcggcctgcgtcaccaccatcccgatggaacgcgcctgggccgcagcccttgtgctgatcctcatcgtgctgatcctcaacctcatcggccgtctcgtggcgaagatcttcgccgtcaagtcggaacgctgagcgcggtcgaatagtcgaaaacataagaacaataaggaaaacaaatgggacaacgtattgatgtcaaccatctgaacatcttctacggcgacttcctggccgtggaggatgtgaacatcaacatcgaagccaacaaggtcaccgcgttcatcggaccttccggctgtggcaagtccaccgtgctgcgcaccctcgatcgcatgcacgagatcattccgggcgcccactgcgaaggcgaggtgctgctggaaggcaagaacctgtacgacaaggatgtggatccggtcgccgtccgtcgtgacgtcggcatggtgttccagcgtccgaacccgttcccgaccatgtccatccgcgagaacgtgctggccggtgtgaagctcaacaaccgcaagatctccaagtccgacgcggatgatctggtcgagtgggccctgcgtggcgccaacctgtggaacgaggtcaaggatcgtctggacaatccgggcatcggcctgtccggcggccagcagcagcgtctgtgcatcgcacgcgccgtggccgtgcacccgcaggtgctgctcatggacgaaccgtgctccgccctcgacccgatctccaccctggccgtggaggatctgatcaacgagctgaagaacgagtacaccatcgtgatcgtgacgcacaacatgcagcaggccgcccgtatcgccgactacaccgccttcttcaacctgaaggccgtcggccagccgggtcacctcgagtacttcaccgacaccaccacgatgttcaacaacccgcagaacgaagaagccgaacgctacgtctccggacgttttggctgatcgataaggccgattcgccaaaacgtagtgccaacccggtgggttggtgcgagtcagcttcagctggccagttaatagcgcttcgctgtgcgaaactctgtaattgtacgttttggctgatcggcagctccttttccccgcaaaccgacgttgagattgctctcggcgtcggtttgttgtttttcttgtggaagcgacacgcgctgttgagaatcattctcagttacggttatgatggattcaccgaagcatgaagcatatgaaaatggaggaaccatcgtgaaccgttatgcaagaattgcgattgccgtactcgcttccgtcggccttctcacttccgcgtctgcctgcggaacgtcgcagaacggtgccggttccgcgcatggcgcgatttccgtcgtctcctccatcaaccaatggggcaccctcgccgagcagctcggcggaagcggcgtgcaggtgaccagcatcatcaactccaccaacgtggacgcgcacgactatgagccgaccacgtccgacatcgccaaactgcagaaggcacgaatcgtcatcgtcaacggcgccgggtacgactcatgggccgtcaaagccgcgcaatccgccaaatcgcaagtcatcaacgcggcggagatcggtggcgtcaagaatggcggcaacccgcacgtctggttctcggcggcggtgcgcaaagcggtcgcacaggccatcaccagggcatacgagggcacaaggcccgacggcaaggccgatttcgacaagctgaaccagcaatggcgttccaaggaagacgaggtcgcccgaaaaatcacggagaccaaacgcaaggcggatggcgaagcctatgccgccacggaatcggtcgccgaatatctggccggggacctgggcctcaaagacgcgacgccgaccggctacacgcgtgccacggccaacgaaagcgagccaacgccgaccgacatcaaacagttcaccgacatgctggaagccggcaaggtcggcctgctggtggtcaacattcaggaggagaccgagctgaccggcaagatcgtcaccgccgccaaatcgtccaatattccgatcgtggagctgaccgagcagatgccggagcagtacgattccctgacggactggatggccgcgctcgtcgacgcgttctcccaagccatctgatgcggaccgataaaaaagacgcgaaagtcgataaaaaaagggcgattccactgaaggaaccgcccatttccgtatgaaaaggactgttacagcaccgcggtgatgatgaagtccagaatgaacagcacggccacgacccagatcaccggatgcacgtccttggcctgcttcttgcaggtcttgacgatgcagtaggtgatgaagccgccggcgatgccgtaggagatggagtagctgaacgccatgaacacggacgcgaagaacgccggaatggcttcggagatgtcgccccactcgatttccttcaaggaggaagccatcatgcagccgaccacgaccagcacgcctgcggtcgcggcggacggcacggcggagatgaccggggagaggaaggcggacagcgcgaagcagatcgccacgaccacggaggtcaggccggtgcggccgccggcggcgatacccgcggaggactccacgtaggtggtggtgttcgaggtgccgcagatggcgccgatggaggtggcgatggagtcggcgaacagggccttgtccatcttggaggagaagccggaaccgttctcaagagccttctcgtcctcggcggagaagatgccggtacgacggccggtgccgatgaaggtgccgatggtgtcgaaggtgtcggacatggagaacgcgaagatggtcagcaggatgatcggcagcttcgacacgtcggagaacagcgccgggaagccatccttggtgaagatcacgccgaaggtctgcggcagctgggcgaaggtgtcggcgatggacacggagttggccatggtggtctggcccatcggaatgccgacgaccgcggtgacggcgatggcgatcagcatgccgccgcgtaccttgagcacggtgagcacgatggccagcaccaggccgatgatgaacagccagatggtcggattgttcatgacggcaaggcccggggtggcctgcacggtgtcgccgctcttggccgcggacttggtggtgaaggtgaagaaaccgacgttgaggaagccgacgtaggccacgaacaggccgatgccgccgccgatggcgttctgcagcacttccggaatggcctggatgatcatcttacggatcttggtgacggtgatgatgatgttgatcaaaccgcacaggaacaccatgcacagggtttcctgccacttgaagccgaggccgaagcacacggtgtaggtgaagaacgcgttgaggcccatgccggcggcctgcgcgtacggaacattggcgaacaggcccatcacgagcgtgccgatgatggccgcgatgatggtggcgaggaacacgccgccccacggcataccggtcgaagacaggatctgcgggttgacgatgatgatgtaggacatggcgaagaacgtggtcaggccggccatgatctccgtggagacggtggtgccgttctccttgagatggaagaatttctccattttctcttttctcatctttcttgggttggtaggcgcgtgccatatggtggcgtgcgccggcgagaatcgcgactcgcctgggacatgcgtccctgaacaaagcaaacgtagcacctatgtaagtcatggaaatttcgtgcgattggtaaggggttgcttttgcggcggcgcgacacgccggtctggattagtccaaacgggtcagtaaattacccatttgtaaaccacagaccgttggttggagcgtgcaagcgctcacgaagtttggttcgccaagccagcgcaggttgaagaacatacgcccaccaagggctttccgcttagcggtcgaatgttgctctgcctgcgtgcagggcttttttttattgccctgcgaggtgttccgaatctcacagtcaacggttgactaaggaaggaacgccatgaagaggcccgaaaaggaagcggtggtcgctcagcttacggacaagttccgtgacgccgacgctatctacctgaccgagtaccgcgggcttaccgttccgcagatctctgaactgcgcgaaaagctaggccgcgatacttcctacactgtggcaaagaacacgctcgttcgcattgcagccaaggaagctggcatcgaaggtcttgatgaacttctcgccggcccgaccgctgtgaccttcgtgaagggtgacttcatcgaagctgcgaagaccctgcgtgacttcgccaagaccaacaaggcactgatcatcaagggcggcttcgctgatggcaccgtctacgatgctgaaggcgccaagaagctggcagacctcaagtctcgcccgcagctgctcgccgagttcgccggcgacatcaaggctacgatgtccaaggccgcgtacctgttcaacgctctgccgaccaaggccgtgcgtacgatcgatgcgctgcgcgagaagcaggaaaaggctgcctgatttcactgcggctcgccgcatgaatgaagcaaccacaaaaaagaaaaacaattgttttaggtgacggccacctcttcaattcagtccgtcgccaagaatgaaaggaagccattatggctaagtacaccaacgatgagctgctcgaagctttcggtgagatgaccctggttgagctctccgagttcgtcaaggccttcgaagagaagttcgacgtcgaggctgctgccccggtcgccgctgttgccgccgctccggctgctggcgctgctgctgaggaagagaaggacgagttcgacgtcatcctctccgccgttggcgacaagaagatccaggtcatcaaggccgtccgcgctatcaccaacctgggcctggctgaggccaaggctctcgtcgacggcgctccgaaggctgttctggagaaggccaagaaggaagacgccgagaaggccaagtcccagctcgaagaagccggcgccaccgtcgagctcaagtgattcgcgcggcttcaagccgcaatcaccaagctgtaatggaaaccccgtttgccgtaaggcagcggggttttccgcatatggagcatgactcaggcatgttctaaaatgggggaattaggcgaaagttgtcaatttatcggttcggaatccttactttcgcgatgaatcatgacacaatggcagatagtgtagtgcgaaaggaaggccgacaacggtgagcgaggatcgacgaatgacgcggcagtggaccgtcaaagttgacggaaacaacgtgaaaacgcttcatgacggcgaaagcgtggaaatcgggcgcaaaccgttgcgcccgctgtcggatgacgggttcgctcgtctcgacatcatggatccgggcaagtccatgtcgaaaagacatgcggtcctctccgtcgacaagcagggcaattgctccgtacgagatctgcattccaccaacggctcgttcgtggtgacgaacaacggccaactgatgcgcctgcccgcaggcgaggacatcaagctgcccatcgactcgatgaccctgcagttcggcgacgtgcgtcttacgctcgaatccgcattcgaacacgatgacgaggatgacgacgccacctccggtgtctcggatgatacaagccagccggtttcgaacctgttcgaatacgcggtctccgacgaggctccgcaggaaccggatgcagccgacatgtccgtggacgacatcctcaatctgcgtgccggcgagccgacgacgttcttccacgcgcgcaatgtcaccgaccgtgccgatgctctgcaccaggcggaacgtcagaccttcacgccggagcatgccgacaagccggaactcgaagatgcattcccctcggtctctttggttcaggaaaccgtcgtggccgcggacaagccccgcgacctgttcgccgacgccgcagcgcaggccgaggctgaagctgagatcgaggccgatgtggccgattccgctgatgcggctgcgaccgatgccgaggtggctgccgtctcaaccgagacagccgctcggcccttggaagcatcccatgacggtaacaagaacaacctgattccggtggacaagctgttcagcgcgcgccccaacacgccaatcgccgtcgctctgcccgacaggaacgacactggcgataacacaggcaacgttgacaaggctgacaatgcggctgacgcgtccgcccaggaacagacgcagtccgccgaacaatcgcagatggcggaacagcccacatcggaaactgccgaacagcagcccgccgaacagcagtcgaagccgatgcacgctacgcagccgcagacggaacagccgggaacggtgaccgcggaagacgacgacgagcggttccgcccgcaaaacagccaatcgcagcccgcaccggacgaaaccgccgcattcaagccgatcttcgaaccgggatcggtattcgaccgtgtgtccaaaggcggcctcgccaagcaggagcagaccatcgaggtcgacggcctgacctccgatgacgccaaacgcacggatgatttcacagtgcagttccagatggcgcgtcatccggaactgttgccgttcctcgccatgaacccatccctatacgatgacctgtacgcgtggttgggcgcattgggcaaccaagacatcgatgcggctttggcacacaatccgggatatgaggaataccgcaaggcagtagggaagtgagtcggtatatgagcgaaaacgaagagacggccaccgcgttggaccgtatccgcggatggcgtgaggagtatcgccttggtctggcaccatccccgcttgaggatgtgacgcaactgagcgcccagcttgacctgacgcatgcgcacccatcgggcatcgcgcagctgttcgccaaaggacacgtcaccttggactcgttgttccgagacaacggcatgctgcgcgccgcgggcaggcgtgtggaacgcgtgctcgacgaccgtgacgcgaaaagccgtgtcagcggcgtcggcgaactctccttggtggtcggcgtggccatttggaaaggcaaccagatgccggtgctcatgtatccggtcgaagtgcgcaaggaaggccgcaacatcgagaacggcaccgtcatcgcgttcaccggacgagtgcgtctgaacgcggccttcgccgccgtgatgcgtgaaaacaacgtgacattggacgagaccaagctcttcgatggttcgaattacgaaagcggcacccccgaaacgtccgcggtgttcgcggccatcacagcgcgcgcgtccagcgttttccccgatttcgaaatcgaacgtcacatcatcctcggctgcttcatggacccgtcttcgcagatgttggtggaaagtcgccagatcatcaaccagctgtcccaaggcccgacaggcaacaccgtcctggacgcgctcgccgggaacaaggaagccgcggacgcgctgaaagacgcgcagattcccgaatacagtccgttcgacgccgatccccatggcgaatacgagattggcgacgttgacaacaccgtccgatacgcggcgcagctggccgcatccgggcattcgattttcgtggacagcgcgatcagcggcaacacggccgaacaggccgcggcaatcgcctcccgttgcgtgatgggcggacacagcgtgctgtacgtgccgtgcgtcaccgaccaaaagcgccgtttcatgcagacgatcgcggccaacgagatgagcggccaattgctggacatcgccgatgacggcgccaatgcggcaatcgaccgtcagctgatagccgcagtcggtttccaatccggcgtcgcgacttcgcgtttcgaccagatttcggatgagctggtgggtgtgcgttcccgcctggcccgctatctgggcgacctgcacggcgtcagccaggaatggggcgtgtccgcataccagaccatccagaacctcgcacaaatcgccgtcctgcccacgcatccgaccacgcatgtgcgtctggccaagcagtccgcccattccatcgcggacaagatggaggaatgggctcagaagctgtatcgcgcgggagaactcggcgaatacaccatcggcgcgcaggacaccgcttggtacaaagcctccctgtattccgaagaggaagcggtcagcgcataccagcgtgtggtcgagctgctgcgcaaggtgctgcccgccacccgcaaacaggtgtccagcaccgtgcagacctgcggcttcccgattcccaccaccgcgcaggagtggggacgccaggtcatggtgctcaagaacctgcgccgcgtgctcgacgtcttccagccggaaatcttcgaacgcgacatcgattccatgatcgaggccaccaagcccaaggcccagcgcaaggccgaaggcagctccatgggattctgggaacgtcgccgccatatcaaggaggccaagtcgatgctgcgcgtcggcgcgcaggtggagaacctgcatgaggcgctgctcgtggtggccaagcaggccgaacagtggcacatgttcgttcctcacggcggatggccggtgctgcccgccaaactcgacgacatcatcaacacgcaggaccagctgacgaacgatatgaccgcgttgaacgtggcgctcgccaccacaccgcagggcggcaatctggacaccgtcgacctcaaccaggtggaagagcgtctgaaggccctgtatgacgacaagcaggcgttggatacgctgccggaacgcgcccgtctggaacgtgagttccattcggccggtctggatgagcttgtggcggacctgagcaaccgcggcgtgccgaacgacgccgtggccggagaactgcagctggcgtggtggaccacggctttcgaagacatcgtgaagtcctccgccatcatttccaaccaggatggctccgccatgcaaagcgccgccgaccgattcacccaggtggatgtcgaacacgtgcgttccatcggaccgatggtcgcccaagagtccgtacgccgcctgtgcgacatgcttttctcccgcacgcaggaagccaatctgctgcataccacgcttgccggttcccgaaacgtgccgttgaacaggctgcgcagggagcatccgcagattttggccgcggcaaagccgattctggtggcaacgccagccacgctcgctgccatcaccgacccggcgccgcttgccgataccgtcatcatcgatacggccgcgcatattccgtccatcgagctgctcagcatcatcgcccgcgcgaagcaggtcgtggtgatcgcgcaccgcaagaccgtcacatccgatggcctgcagcgactgatcgcactgctgccaagcgtgaagataaccgacaggccggttcgccgtgcgccgaagctcaacgccttccttgaatcggaaggatacggctccgtgccgtgcgatgtggcgcgtgaaggataccaaggcgaagtcgcgtaccatttcgtgccggacgccaacggtgtgccggtcatcaattccggtctggtcgaatcaagccagcaggagatcgacgaagtggtgagcatcatccgcaagcgcgcggccggtttcaccatcgttcccgcatcgtatgtgcttaccgtggtggcgctcacgcacacgttccgcatccgtctgggtgccgagctcaagtcgcttgccaacaaagacaaggccatgggcatgttcctgcgccacgtgcgcatcgtggacatcgtcgatgtggccggcgcccacgccaccgacgcgattcttgcgatgtgctacgccaagacctcgcacggcaggctgctgcagcagttcggcgcgctggaatccgacggcggccgaggcatgctgctggacgctttggcggtaccggaccgtcatctcgacatcgtctcgtccttcgcatccgacgatatggacgacgagcgactgcatcaggatggtccgaaggcgctcaaaaccgtgctgcgttgggccgaacagcttgatgacagcatggtccgcccggcgatcaaggagtccggagagaacgtgctcttcaacgatctcgccgagaggatccgcgaacgcggcttggacgtggccgtcgattacggtttcgatgacggactcaaactgccgttggtggttggtctgaaaggcgagccgttcgctttggccgtgctcaccgatgacgcgcagttcatgggactgcaatccaccagggaacgccatcgcgtgctgctgcaggacatcgaatcgcttggctggtcggtgatgacggtatggagcgtcggcgcgttcgtgaaccccgataaggaagtcgaccgcatcgtggcacgactgggaagcctgtaccgggaggaacggtgagcgccgagcatatcgaaaacgtcatggagcatgacgattcgcagacccagtccgagacgcactccacacccagttattccgccacgcggcggaccgcacgcaagcataagcgcgtggtccgccaaggtacggaactgttcgatgccgatggcgtcaaactcgaaccttcggacgtgctcaccaagcgccaacgcgaggcggatgacgacaagcgcatcctaaacgagcttccgccacattgggcggtcttctccgaacgcggccgctgatacgtccagccgggtgccagctatcgattaggattatcagccattaattgatggtggcgatgaccgcactgtattcctgaacccgcaacacgacggccgcctcattgggcggcatggcgaacaccgcgatggtattgccttgcgcatccttagccggtttgccggtcagcagcgcttcggcgcagatcgtgcgtaactgcgcatccacaccaccgtccggcatatcattagccatgccggacggcgtttccgtaccgtttggcatatccgcgacattcggtgtgccggactgcatctcagcatctgtcatggtggcgctggaaagtgtcaccttgtctccgggaatcaaaccgtcggccacacttgccaaacgcacttcgatactcgtatggccctgcggcacaacgggggacgcacgggccatgcccgacataagcacatcgtgcgcgccgatgcccacctgtgcgatcaggccgacggcgtcgtcaagcgtatggaaggcgttgctcagcgagccatcgctcggcgcctcacgtaactccacggcttcgcgtgtgatggccgtgcctttggcgacattccgcaccgcgaccacaataggctgcgtggcgatggctgcgcgtacgcattgcagcgtggcgaataccgtcaggccagcgcacaatgcggcgaggaaccgatgcaggcgtgcgttgcttcgtctggcttccaacgatgcggcagtcgaaccatgccggtctcgttgcagacgcgtcgtgcgcgcggtccgtccttccgaagccgtcgatgtgcgcaaactcgaatgtggccggcggtccatcaaggaatgaaaaaaggtcatcatgcatgcatgatgacctgattgttatgaccacggcaagcggaatccggggttgtggtcggagaatgggagttatccacaatctccggcgtgtcgcgttggattccgcgcctgtgggtcacttggatttgtcggtgcggtagaagccggaccccttgaactcgatcggcaccgcggaataaaccttgcggacctgctcctcgccgcattccgggcatacggtgatcggatcgtcggtgaacgactgctgctcggtgaagtcgtagttgcagttcttgcaacggtaatggtaagtaggcacgatatcctcgctttacgcacaatcccaaatttcttaacgggacatatcctagtacgttccctgagacggccccgcaaccgtcctatcctcggacatcggcataaccatccggcgtgagcacgccgtcgacgggaatatcatgcggctcatgcggcacggtctcgtcggtcggctcccaaggccagcaaacggcgaccacgcgcgcggtgctgctacgatgctccaaagcgcggtcgtaccaaccgccgccgcgccccaatcggaaaccatgttcgtccacagcgaacgctggcacaatgatcagctcggccgaagtgagaacttccggtccttccgctgcgttttccggctcctgcgggcgatgtgtgttgatggaaccatcagcattgcgctggtcgcgcagatcgtcaagaccgttcagctcactccagccgacttccatgccagcacccagacgcggcaccaaaacacggcaatccgtgtcgaacgtcgcttcgagcaacggcatcatcgatatttcactgcccatcgaggcgaaggccgcgacggttgatcgcggtcgaatcaacgacgcttccaatgcgtgttcggcaagcagtcgtcccgcttcgcgccgctggtcggcggacgtccgctttcgtcgttcgatcgcagccgcgcgccaatgccgtttcagctcgcgttgttgctcatacatgtccatatcgttcgttgtaccacggttcgattgcgtggaaaacggaacatggggtatgggtggggcacaatggaagggtgacgattttgcaatccttgagcgacatgatgcgtcgtccggggaataattcctttgaaatgccggaattcatccaatcgcatagcatgcgcgtcccggtgagtctgcgcccgttgacgggtgccgactatgacgagtggaacgaggttcgctggcgcaacgatgcctggctcaagccgtgggaatccggcgatccgctgcacggcgcccccatcacctacaaggaatggatgaaacaactgcggcgcaacgaacgggccggtaccggtgccgtgttcgccatcgaacagcatggccgtatcgtcgggcagatctcgttgggcgcgatctgctacggcgcgatgcgttccggcgtggtcggctattgggtggacgagcgttgcgccgggcgtggctacgcgccgatggcggtggcgctgttggcggattgggccatgttcgacccgaccggacctcgactgcatcgcatggaaatcgacattttgccggaaaacaagcggtcccgtgccgtcgcacgcaaggtcggagcaacgttggagggggtgcggcgcgcgtatatgtacgtcaacggccaatggcgcgatcatgaaagctacgtattgatggccgaggacgcgccaaacggtttcaccgcgcgtctgatgacagggaattcaccctcctgattcgacacgccggggaggactcgcctcgaatgtcggaatgtcacctattcttatgacatatgggttatgaatcgttaagcacggtggtcgtgcttgcgatcgttgtcatcctgatgctcatttggttgcccagacggacgattaaaggcatgaagagggtgatcgaacatcgcgaggaccgcttttcaccgtcgttgcatctggtggatgccgacagcggaacgcgattttccgatgagaccgtcgcggcagcgaaaggggtactgatgcagtccacagaggcgcacaaaggcgcaacatccgaagaacggatcgcggaaattcgcgcccttcgtcacgccgcggtccgcaggaggcgcgccatcgccgtctcattgctgacaatcacggtcgttgtgctggtctgtgcgttcgcactgcacttcagtccgctgttcgcgctcattccggccgcgttgctggccgcggtgctcgcgttgggtgtgcgtgcgtccaagcaggccgtggcgtgggagcggaaggtcgccagataccatgccaaggtgaagaagcgtgccgccgccgaacgcaaacgtgcgcaggcggagcaggcggaacgtgccagactgcgcgcgcaggagctggccgaggcccgcaaggtcgccgacgagcagttgaagaccgatgtcgttcccgagggggagattcgtcaggcgatcgcccgcggcaaggccgatcgggacgccgcggtgaaacggcgcaaggaagagatgtcttccaaggaagagacgcagactgccgagaaggccgtcgaccagacaaccgaacgtgcggatgccgcgcccgctgacgtcaaggaagtgggactgtccatccacgatgagcgagacaatatggccgaagaagccaaaaccgttgccgtcaagtccacgcaggacttgatttccttctcgttgggtgcgcctcgcgacggtgccgacgttgaggtggatgctccggaaagcatggagatcaaatccaccaaacaagtggccaaggccgtgcccgtcgaaacgccttccgacgaggctgagccgttgattccgccaagcgacgcaatgggcagcatggatgccgatgaggccgccgcccgcgtggatgagggcgtgcacctcagagaggtcgacgttccgggattccacgatgccgaagtacgtgccgatgtggaggctccggatgtgacttcggactccctaggcaccggcctggaggccattctggcccgtcgtagcgcctgacgaaacgcttgaaccgttttttacaaagtctggaaccgcatggtttcaggcttttttgataatttctctcagagcgttagcactcgagttggcagagtgctaataatcgcgctaggataagtcacagcgcgaaaggacgacgccgtaagtgatcgtcagcctcttgctagcgggtcccggcgcggtaagtatcgatttctctttagaaagaggaggtccacagtgtcgatctcactcacaccgttggaagacaagatcatcgtcaagcaggcggaagccgagacccagaccgcttccggtctgttcattccggacaatgccaaggagaagccgcagcagggtgaagtcctggctgtcggcccgggccgtcgtaacgacgccggcgagcgtatcccggtcgacgtcaaggtcggcgacaaggtgctgtactccaagtacggcggcaccgaggtgcactaccagggcgaggattaccttatcgtctccgctcgtgacatcctggccatcctcggctgagactagcgcgtagctgtcgaaaccccgtttcccgtatattgcggttcgcaaggctcgggaggcggggtttctgcgttgttcggcgccgatttgcgtaaaacgttggaatttcaacgatttgggccgtttttggctgtcgcgacacgccgtatttgcataagtcggccggtctgtggcatactaaacgggttgccggttggggttcaaccaaacaggcagcacggcggatttcccaagcggtcaaagggaactgactgtaaatcagtcgcctcgtgcttcagtggttcgaatccactatccgccacgcctcgatagctcagtggtagagcacttccttggtaaggaagaggtcgtgagtccgattctcactcgaggctctcatggcgggatagctcagctggctagagcgtacgactcataatcgtaaggtcaagagttcgagtctctttctcgctacaaaggccgacggaatgtcggtatagcaacgaaccacaagaggtgaactaaatggcaagcaagagcgccgacattcgtccgggcatcacgctggcatgcaccgagtgcaaggagcgtaactacatcacgacgaagaaccgtcgtaacacgccggatcgtcttgagctcaagaagttctgctcccgctgcggcaagcagaccgtgcatcgcgagacccgctgagcggaatcaagctttcgaaacccgaccaatttggtcgggttttttgttactctggagcgttatgactagttttgcagatctcaccaccatcggcgtgggcggtcctatcgccactttcctggagccgaccacgcgcgtcggcgtcatcgaggccgttgaggaagccgattcccaaggactgccattgtgcgtgatcggcggcggatccaacatgctcgtatccgacacgccgttcgaaggcgtggtggtccgcgatgcaagacgttccatcagcgtgttggatgaggcggctccggtcgaggatgatgggcgtgtcgtccacgtgaacgccgaagccggctgcaactgggatgatttcgtcgattactgcgtccgacttggactggaaggcgtcgaaggcttgtccggcatccccggcaccgtcggcgcgtcggtcgtgcagaacatcggcgcgtacggtcaggaggtcgccaccagcgtcgacagcgtcgaggtttgggaccgcaaggaacgtgcggtaaaggcgttgcgcaacgatcagctcgccttcggctaccgcatgagcgcgctgaaagccagcatgtacagcgctccggcgactccggccgcggaatttttcccgacgccgcgatacgtggtgctatccgtcacgttcgcgttgcggcacagcgatacgggcgtggtcggttatggtcagctcgccaaggcgttggacgtcgccgtgggcgatcgcatgaacaccgcggacatccgcaacgcggtgctgaaggtgcgtgcggctaaaggcatgctggaagacgcgcatcgctatgcgtcgccggccatgcagggcaccaagaagacgaatctggtcgatgtcgctcttgaatcgcaatccaagcagaacggcgatgacggtccggacttcaaccgccatagctgcggcagcttcttcatgaacccgattctcacgccacagcaggccgagacgcttcccgaagacgcgccgcgcttcgacgcggcattgccgggcggcgggcagggcgtcaagacttccgcggcctggctcatcgaccatgccggcttccataaggggttcaaaatcaacgaaaacgctccggctggcctgtccacgctgcatacgttggcgttgaccaatcgtgggggagcatcagccgaagatatcgcccgcctcgccaaaaccgtgcaggacggcgtcgaggccgcgttcggcatccgactggtgcccgagccggtcgtcatcggcatgaatcttaaatagcgtcacgcacgccgtcaatgtgacgaaaacgacttatacttgcgccttgtgctctagaaggtggagcgtgaaaccgcgcgggcggaaagaagagaaggacgagacatgaacgtatttcgcaagaaatccgtcgaacagacgctggctgaaacaggtgagtccggccatgcgctcaaacgcgatctgacctggtgggatcttgccatcatgggtgtggccgttgccgtgggcgcaggcatcttctccatcggcgcgcaggcggctgccttccatgccggtccggcggtggtgctgagcttcctaatcgcaggcgtcgtgtgcggcgccgccgtgatgtgctacgccgaattcgcctccatgattccagtggcgggttccgcctacaccttcacctacaccaccgtcggcgagatcgtggcatgggtgattggctgggatctgatcctcgaaatgctcatggccggttcggtcgtctccaaatactggggcgtgtacctcaaccagttcttcgagctgatcggctggaacatcaacaccaacatcgccatcggctcgttcaacttcgacctggctccggtcatcatcgtcgccttcttcaccgcgctgctggtgatgggtaccaagatcggcgcccgcgtggacggcgcgctcaccattttgaagatcgccatcgtcgtgttcatcgtggtcgtcggcttcttctacatcaaggccgaaaacttcaccccgttcattccgccgagcgaacccgcagcatccaccgacggctccggcgtctccgcggtcatggaacagccgctgtggcagtgggccaccggcatggcccccagcatttatggcgtgaccggcatcatctccggcgcggcactcgtgttcttcgctttcctcggcttcgacgtcgtggccaccgcttccgaagagaccatcaaccccaagaagaacgtgccgctgggcatcggcgtgggcctcggcctgatcatcgtgctgtacaccctcgtggccatcgtcaccacgggcatggtctcctataaggaccttgccaaacagtccgatccgtcactggccgtcgcgttcaagatggtcggcgccgactgggccgcgaagatcatcagcctcggcatcgtcatcggcatggccaccgtggtcatggtgctgctgctgggtctgacgcgagtggtgttcgccatgagccgtgacggtctgctgcctcgcggtctgagccataccggcaagcatggcactccggtgcgcctgcagatcatcgtcggcgtggtcatggcgctgatcgcggcctgctgcaacgtcggcatcctgtccgacatggtgaacatcggcacgctttcggcgttcacgctggtggcgatttccattccgatcatgcgcaagaagcgccccgacctggaacgctccttcaagatcccaggcaacccgtgggtgccgatcctgatcgcgatcgccaacctgtggctgatggtcaacctgagcgtgctcacttggatccgtttcgtggtctggctcatcgtcggcttcgccatctacttcggctacggctaccgtcatgcccgtctcggtgccggcgaactcgaagttgccgcgcaagagtaatctggaacagtacacgttgttgttgaggaggtaagcatgccgtacgttgttgcccagccgtgtgtggacgtcaaagacaaggcctgtgtggacgagtgcccggtcgattgcatctacgaaggctcccgttccctgtacatcaatccgaacgaatgcgtggattgcggcgcatgcgagccggtgtgcccgaccgaagccatcttctacgaggatgacctgccggacgagtgggcttggtacaaggacgccgccgtcagcttcttcgccgaagtgggcgatctgggtggcgcttccgcagccggtccgatcggcaaggatccggaacaggtcgcggccctgccgccgcagaaccagtgagcatgtcttgctgatgcgtccgccttccatattgcgcgtaaagcggaatattcgcggtcgattttaaccggtttgccgctgacgtttgcacacgtcagcggcaaaccggtttttgcatggaacggttgcatgtgccggaacgtcgattgccgtatgctggaacatggttgtgatttccgcttgaaaaggagccttacggatgggttttcatgaattttcatcgccgtacgactggtcccgcatcgcgtcgtacaaacgtacggcgaaagccgcgttcggtggcatggtcgacctgtccgtcggttctcccgtcgaccccgttcccgattcggtgcgtaaggcgctcgcggtctcgtcgaacgacccgaacgcgtacggatatcccgttacggcaggtactgccgatttgcgtgacgccattcacgagtggttcgcggccgcccgcaatgtcgatttgcgtgcgattggcgccgatgtggtgccgacggtcggttccaaggaaggcgtcgcgttgatggcgtcgctgctgcatttcggcgaaggcgacgtcgtcgtgcagccgaaggtgtcgtatccgacgtacgagatcggcacgcagttggccggcgcgcaaacgctgaaggtcgacgacgtggcggatgcggattcctggaaggatgtgccgggcgtcaaggccgtttgggtcaattcgccgtgcaatccgaccggtgaggtgctgtccgcggaacggatggccggtattgtgcgtgccgcgcgcgcgattggtgccgtggtgctgtccgatgaatgctatgcgttgatgcaatgggaagacgacgttgcggaagcggatgcggatacgcttgcctccacgccgtgcgccttgcgcgccgatgtgtgtggcgggtccgccgaaggcgtattggtgctgtattcgctgagcaagcaaagcaacatggccgggtatcgtacggcgcttatcgctggcgatcgatcgctgatcgggccgatggcggcataccgcaaacagatcgggcagatcattcccggaccggtgcaggctgcgatggccgccgggctgcgtgacttcgacgcggtcaagacccagcattcccgttatcaggagcgtctgggcatgctggtgagtgctctgcgcgcatacggatactgcaccgacatgccgcaaggcgcgttgtacgtgtgggtgaaagccaagtccggcgactgctgggaggatctgcgccagcttgccgaaatcggcatcgtcgccagccccggcgagttctacggagcgccggaatacttgcgattctcggctacggccagtgatgcggcgatcgcctccgccgcggaacgattggcacgttgacggtttgctgacgatggccttttgacgaacgaaagcgttgaaaacaaaaaggacctccgattcactcggaggtccttcattatggcggagtcagagggagtccaacgcccatgcgtcttatggctatgtgcagctgttgatgtcgctgatccaggagtggcgtgcgctactcaagcgtccggaactaccattcatattcgcccaattgccgaactatactttggaacccgattgcgattggccaaggctgcgtgatgaacaacggcgcgctttgacgttgtggaacacggcgatggtggtgacgatcggatatggagaggataatgacctgcatcctttggacaagcgtcatgtcgcgcagcgcttggcaacggctgccgagtcgttggtttatggacgtgatcgcgagccgatggggccgcttcctgtcatggcgattcacaaggatgacggcattgagatctccttcatccatacgggagggggattggtctgcacaggcgacgtgccttttgacatcttggagccgggaggctcgatatatcgggtgaaggctcgtcggtacgattgctatggcggtaacggaaccgggcgtgcgagtggcgcagtgagagaactctccccagtacagtgtcagtttgtcggccaatgaagcatcgatgataacgctattgccggggacagcgtaaatagtttttgcagttaatcgtgtttgggtggaagcttgtaatttcctgcttttggaatacttaaatctattcgaaagtttcgtaaatatttgcatatagaactttcgtaacaacaattttaagtatttagttaagtgacttgactttcttgaaagtcaagtcatataatcaagcaatgctttgactgaaatgctaaagcatttacgaaacatgaagatgtgtgttcgtgcatgtcgccaagggagaaagactttgtattcccacatccgatattggataaggagattcagcaatgaagtttgaataccatgtcaaaccaaccggcagcgatgttgcgtgcggcgacgcggagcatccgttcgccacgatttccaaggccgcgcagatggcctctccgggtgatacggtaatcgtgcatgaaggcgtataccgcgaacaagtcaatccgagacgcggcggtctgagtgaacatgagcgcatcacctactgcggagccgaaggcgaagcacggccggttatcaaaggctcggaatgcgtgcagggctggacggaattggccgatcatccgcatgtgtggacggtggtgcttgataatacgatgttcggggatttcaatccattcgcgaccccgattttcggcgactggctggaaatgcctaagttcggcaaggatccggacaaacatcttggcgatgtgtatctcaacggtgtttccttcttcgaatcgacgacgttggaaggcgtatacgatccgcagccgcgtgatacggatgaggatttcgcgttgaagattccctgccccgtgccggatgtggaccgtacacgttatgtatggcatgccgaagtggacgagaatgccggcaccacaacgatctgggcgaatttccaaggtgccgatccgaatgaggaactggtggaggtcagtgttcgtcgcacatgcttcttcccttcccgcaaccatgtcaactacatcaccgtgcgtggctttgaaatggcgcaggccactggagattgggcgccgcctacctcgcagcagtggggcatgatcggcccgaactggtcgtatggctggatcatcgaagacaacgtgctgcatgacgccaaattctccgcggtgtcattgggcaaggaaatctcatccggcgacaacgagtgggtgaaaaccgagcgcaagaccggttaccagtaccagttggaggccgtattcaaggcccgtcgcatcggctgggaaaaggggctgatcggcggtcatatcgtacgcaacaacgacatctacgagtgcggacagaatgccatcgtcggacatatgggcagcgcattctgccgtatcgagcataaccatgtccatcacattgcgttgaagcgtgaattcttcggatgggaggtcgctggcatcaaattccatgccgcattggatacggtcattgccaacaacaacatccacgactgctcgctgggcatgtggatggattggcagacgcagggcacgcgcatcacgcgcaatgtgttccacgataacgtccgtgacctcatgattgaagtgagtcatgggccgtatctggtggacaataacgttttcgcctcgccggtgatgttccagaactggtcgcaaggtggtgccttcgtcaacaatctgatttgcggcggcattgaaccgcataccgtccccgaccgttccacgccgtatcactatccgcacaccaccgaggtggccgggtgcgctgtggtatccggcggcgatgagcgttggctgaacaatatgttcgcgccgcaaccggtgaaaccgaccgtcggtgaatatggtttgtccgcctacagcgattgcccgatgtcgatgcatgaatacttggaacgccagcgggccatgtgggcagatccttcgcagggtggtggcgagcgcaatcctctgcagtctctatacgcgggcggcaacatctatctgtccggcgcacaggggctgaacaagcaggaaggtgcgggcgacgattcggaacgcatgcaggaggacgccccgttcttcggcggcaccgcctccacgagtgttgcgtgtgatgagcccatgccggtgacattggtcgaagaacccgatggactgtacctgcagtgcactgtgccacaggccgtcgccgataccagaatgcaggtcgtcaccagcgatatgctcggcgtgcctcgcatcgtggaggaacgctatgaacagcccgatggcagtgactatgtgctggacaccgacttgctgggacaagccttgacggcaacggaacgcaaggccggggcgttgaatggtcttgtctccggagagaatcacatccgaatttgggaatggaacaactgatatgacaaatgcaaccgataccaacaagacattgggcgagtccatgttcgcacagtgcggatatgcccaggacgccatcgataagcgcgtgtcacaggtctggcatgaaattttcgaaggtccgaacaaattctattgggagaacgacgaaggtcttgcctatgtgatggacaccggcaacaacgatgtacgtaccgagggtatgagctatgcgatgatgatcgccttgcaatacgaccgtaaggacgtattcgacaagctgtggggctgggtaatgcgtcacatgtacatgaaggacggtcatcatgcgcattatttcgcatggtcggtcgcgccggacggtacgccgaactcgaatggtcctgcacccgacggcgaggaatatttcgcgatggacctgttcctcgcctcccgtcgctggggtgatggcgaggatatctacgaatattccgcatggggacgcgagatcttgagatattgcgttcataagggcgaacgctacgacggcgagcccatgtggaatcccgacaacaagctcatcaagttcattccggaaaccgagtggagcgatccgtcctaccatctgccgcacttctatgaagtattcgccgaagaagccgacgaagaagaccgtccattttggcatgaggcagcagccgcaagccgtcgctatctgcaggcggcctgcgacgagcggaccggcatgaacgctgaatacgcggattatgacggaaagccgcatgtcgacgagtccaatcattggcatttctattccgacgcctaccgtaccgcggcgaatatcggactggacgcagcctggaacggtccgcaggaagtgctgtgcgaccgcgtcgccgcgctgcagcgattcttcctgacccacgaccgtactagcgtctacgccatcgacggcaccgccgtggacgaggtcgtgcttcatccggtcggattcctggccgcgaccgcgcaaggctcacttgcggcggtgcattcggcccagcccgacgcggaacataatgcccgtgaatgggtgcgcatgctgtggaatacgccgatgcgaaccggcacgcgtcgttactatgacaatttcctctatgctttcgccatgctggcgttgagcggaaagtatcggtatgaatgatgattacctcaactaatcctacggtctacacggattttcctgatccagacatcatccgggtcggagacgtgtattacatggccactacgactatgcatttcacacccgggtgcgatattctgcgcagctatgacctagtgcattgggaattcattgcgcacgcattgaatatcgtggcggatacccctgaagaacgtttggaatgtgaaggtgccaacgcctacggtcgaggcatgtgggcgccgtcactgcgttaccatcggggcacctggtatgtgttgttcgccgccaacgatacgcatgccagctatctgctgacggcggacgatccatgcggcccatggcgaaagcgtgagcttgacggcttctatcacgacagcggactgttctttgacgacgatgatcgagcctatgtcgtatatgggcagtcgacattgcgcatcacggagttgaatcctgaattaagcgggccgatgccgggtgggctcgaccgggtcatcgtgcaggacgatccgcaggctgaccttggttatgagggcagtcacctgtacaagcatgatggacgctattacgtcttcacctgtcacttcccgcaaggcaagggcaaaacagaagcctgcttgatagccgaatccttggatggcgctttcgaagcgcgtgaaattatcgacgacgacctgtccttccacggttacggagtcgcgcaaggcggtatggtggacactccggacggcgactggtatgcattcatgatgcaggaccgcggcggtgtgggacgcgtgccgacactgatgccgatgcggttcggcgaggacggattccccgtcatcggcgagaacggcaaagtgccgcattcggtcagcgtgccggctgcaagctgtgccgaacctgtcgcgcccatcaacggcagcgaattcatagcccggcataacgctgaaggcggagtcgatgccaactgtctgcagccatactggcagttcaatcacatcacacatgacgaatactggtcactgacggaacgtccgggagcattccgcctgcattccggacgcatcagctcgaatctcaatcatgcatggaacacgctgacgcagcgcacgatggggccggtgacggtggccgaagtcaccgtcgacgcgtcgacattgcatgatggcgacttcgccggattggcggcgttccaaggatgctattcctacatcgcgcttacgcgaaggaacggccgcacgatgctgaccgtccaatacaagccggtgaatgacgattccatcttctccgacaatgattgggacagtccagccgtaacggatgcggaaatcatggcggatgcggattgcatgcgcctgcgcgcggtatatgatttcaccgattgcaaggatgaagtgacgttcttctaccgcgatgcggatatgccggaatccgaatggcgcccattggggacagcgcaccggatggtcttcaaaatggatcatttcacaggttgccgtatcggattgttcctgtattcgacaaaagagaccggtggaatcgccgatttttacgactttgcgtattcgacgccgaatacgaaggaaggagggcgatgaagcgacaggccatagtggcgcagggaactgtcgaaggcttggcggctgaagatcagggcatcaccgtgttccgaggggtcccgttcgcccagcctcccgtcggcagtctgcgctggcgtgcgccgcagccggccctgccatgggatggtgtgctgcaagccttcgatttcgggcctaccgcgatgcagccgacgccgggtgcctccgatgatttctatgatcgtgaatggggcaccgatccggccgtgccgatgagcgaggattgcctctacctgaatatttggactccggcattacgcggatatggcgcggatagcatggtagcctccgaaaagctgccggtcatggtctggatctacggcggagcctatcaatgcggcggcacatttgaaaaggaattcgacggcacacatctcgccgcgaacggcgtcgttgtggtcagtgtggcctatcgtctgaatgcatttgggtttatgacgcaccctttgctgcatgaggaggccgtagaacgcggcgacggcgaaccatatgcgaatttcggattcctggatcagcgtgccggaatccaatgggtgaaggaaaacatcgcgaagttcggcggagatccggaaaacatcacggttttcggtcaatcggccggtgccgccagcgtcttggcccagatctgctcgccgatgaatcatggcctgtttcagaaagccatcatgcaatccggcgcaggcctagggcatttcaatgcgcggcaggacacgctggagcatgcgcaggccaacggaatccgtctgttcgaagcattgggtgtctccacgctggagcaggcccgtgcaatcccggcccgaacggtattggaagccgccgagtccctgcctgttccaccggacagcggacgtgaagatgactggtcgatgatcgtcaattgggcgccatgcgtggacggcctgttccttcccgatcaggaggagcgtatcgtcgagggctgcaaggccaacaacgtcgacatgctggtcggcaacacgaccaatgagttcatcgcttcgactgaagatgggaagcctgtgcatgtcggccagctcggcaatctcacgctgatccgcaaatggaccgcaagcggtgggaccgcgccatactactatcatttcgatgtcgctatgccgggggatgatgccggagccttccactcatccgatctgtggttctcctttggaagccttgcgaaatgctggcgtccgttcgttggatggcattacgatctggcaaggcgaatggggctgtactggaccaattttgccgccaatggcgatcccaacggaacggaccgtgacggaacgccgcttcctgtatgggatccttgcatcggtgaggaatgccccgccatgcatttgtgccaagaaccgggcatgcggacggattggcttaccgaaacggatcgaaaagcattcggcatgtgacggcatgccgttgatgtatacatactgatatgtaaacagggacggtctttgcggatcgtccctgccgcataatgatttgccgttgcgcgtgcaggaggatttcgagactgattatccgacttttcaccgtttctgtcgtctggttcgtcggtggcgtctcgcggaggctcgggccattaaagaccctgttcggcgttgtgcaggctaggagctgtttgaagtgttctaggccggacgtttcgccgtataggggcgtgtctgcgtggattccgtcggatgtggcgtctcaattgttggacgttgcggtgagcgtgaacgggggtgattatgaggaagactgaaccccccgctcatgaccattgccgacacgatggcctatttgcagtgcagtcgtcggctgtcttgttgggtacccaactcgggtaccttgctgggtaccggaaatgttggcattggcgtacatttccgtacattctctgtttgcgccgtatgttttgaaatcgttggtattccgccgttttggcatgaaaaaagggcttccggatttctccgaaaaccctcaaggcggagtcagagggattcgaaccctcgagccgctaaacacgactaacaccttagcagggtgcccctatcggccactcaggcatgactccactgttgcgttacgacgcaacagcatgtaactatagcatctatccgcgtgcgaaacaccatattgtgaaaaaatgagagaaaaacgtgtggtgatgtcagtgggactcgaactcgtgagccgtgtcgagcggtctcattgatatgcgacacgccggtatgcccgcaggtttcgccatattcgaacatttgttccaaaactgccgaatcgttgtctatcatggaatcatgagcacagcaccaagaatcgcagcggccaaacgtgactggggtcacgatgaggtcggatgcacggtgctgcatatcgacatggacgcttttttcgcatccctcgaagtggcgcggcatccggaatacgccgacaaaccggtaatcatcggcatcggcaaccgttccgtggtgtccgcggcgaactatgaggcacgcaaatacggcatcaattcggcgatggcaagctcccgggcaagaaaactatgcccgaacggcgtctttctgccggtggacatccactactaccgtgagatgtcccgacgtatcttcacagaggtgttctcccgcgtcaccgatcgcatcgaacaggtttccgtggatgaatgctatatggacgtctccggcgcgctgctgcggtggaagagtccccgcgccatcggagcttggatacgcgatcaggtcgccagacggtaccacatcacctgttccgtcggcatcgcggcgaacaagcttgtcgccaaaatggcttcgaccaatgccaaaccggatggcatgctcatgatccccgtggccagacatgccgaattcgtgcagatgatgccgttgcgtggcatacctggcatcggtccgtccttggagaaacgactgaacgcatggggcgttgattccgtggctgacttggcgaagatgagcatggaatcgcttgagcaggcgacggggtcagccatcagcgcgcgcgggttgtacatggcggcacgcggattggatgaccgccctgtcgcaccgcgtgcgcaggagaaatccgtcggcgcggaacgcacgttcaacaaggacacccaagacatgcggcaggtgacatccatgctccgctggtgttgcgatgatgtggccggcacgctgcgcagacgagggttgatggcgcgtaaggtcatggtgaagctgcgattcccggatttgagctatgcgacgaaaggacatacgctggactgtccgacggatgcggcaagcatgctgtatccgcaatgtgtcgcattattgctggccatgatgggcatgccggaaagctctatcgacgccatttccttgaccagaccggtgcgacttgccggcatgagcgcgggcggtttggtcgaagcggcggatgcggcggttcagctttcgcttgatgacatgcttgaagagcagaacgaggcgcagcggggtcgtggaacggataccgaaccgtcgacccaatcggaacggttacgcggtgcggaagcggcattagacgcggtacggctcaaatacggtaaaggaagcgtgcgtcttggcatatggcgtacggggccatcaggtaatcttgaacattgagagtgatgtggagcatgagaagaaacagggggagtgccatgagatacagggacaaggcggtgcatgcccgcaacccggaagtgctggttgcagggcgtcgcaggctggccatcgtcgcagccgtcgtgcttgttgtattgctggcggtaggtgggtggttcctgacgcggtgcttgcattcatcacagtcccaagccgggcagggggccgcaacgcagatggacgaggccaagcagaaaaagcatgtggtgaaaaaggccgagccgaaggaacatcacggcaattcgccggactgtccggataccgattgcatcgccatgatggtcaatggcgatctgctgttccaccctggtctgtgggacaacttcgccggtcccaataccgcggcgacggacggtacggcctatgacttcaccagtctgttcgaaccgatgcgcaagtacatcgatgcctccgatatcgcggtgtgcgaattcgaaacgccgatcgcgcctcgcggtggcccctacaccgggtatccggtgttcaacattccctcggaggtcgccgacgcggccgccaaggtggggtatcgcgcatgcacgcatgcgtcgaaccattcgtgggatcaaggcgcggatggcatcacacgcctgtgggataccctcgaccaggacggcatcgcacagacgggctcctacaagaccgaggaagactctaccaaaccgctggtcatcgattccccgaccggtggcggtaaactgggcctgatcgccggtaccgtgtccctgaacgcgcaaacccccgattatgattggcgcgtcgaccgtctgcgcgagagcggcgatccgaaccatcaggccgacatcgacaaagccgtggccaaagccaaagaggcccgtaaacaaggcgccgacgtggtggccatcgccatgcattccgtgcaggaatatcttgactacgccgactcgtggcagcagtccgaagcgcatgagctggccgacaccggtgcattcgacgtcatctacggtgccggatgccactgcgcgcagcccgttgagaactacaacggcacatggatcatctacggtctgggcaacgcggtgacggtcacgtcctacattccaggcaacgaggtcaacaaccaaggcgtgacggcccgtgtccaattcgccggcaagaaaggcgtggccggctcatggcgggtcaatcgcatcgattgggtgccgacggccaatgtgcgtcaaggccaataccagtggtgtccgatttcggacgaccatccggatggagcctgttggaacgaaacagaagatgccaatcagagacaacgtatctggaacgtgatctattccatgggcgcggaccagaacgtggttcgagagtggaacatcaccgcagaacaagctggttcatctggaaagtagtttcccgtggcagaatatgcctcatattcgttaatcgacctgtatggagcgtttccgctcgtgatgtgaggtgaaagaaatggatggagttttcgagacccagccggaccgcaccgacttgccgctggtggtcatgccggtggtcattgaatcgatgatcggaccgttcaaacagaacttcacgatgctcgaaaacgtggcccgcgtgcgcatgtacgaggatttcacactggacgaggacaccatcgtggaacgctgcaaggatgccgacgccgtcatggtcatcggattccactgcgccgatgccatcctcgacaggctcgacgccaagtgctatgcgttcggaggcaccggcgtcgccagctacatcaatcttgagaaaaccaagaaacgcggcatccgcgtctgcaacgtgctgcattacggcgatcacgccgtcgcagagcacgccatggcgttgctcatggaactgaccaggcacgccggagcgcttgatatgcaggtcaagcaaggcgattgggacggtgccgacggtttcgaactgttcggcaagaagctcggcatcatcggactcggcggcatcgggcagaccgtggccggcatcgccaacgctttcggcatgaaagtatccgcgtggaactcccacgtgccggcacaggtgttcgagaacctgaatgtcactccggtggaagacatgaacgagttgatctcgaattcagacgtggtcagcgtgcatatgccgttgcttgactccacccgtggcatcatcacggcgaagaacctcgacgcgttgcgtccgggaaccctgttcgtcaacaccgcccgcgccgaagtcatcgaacccggcgcactgctcgcaagacttcaacgcggagacattccggcggccttggacgtgttcgatcatgagccgcttgccgccgacgatcctttgtgcaagattcccggcatcgtgctcaccccgcacatcgcatggcgcaccgacggcgcgtatatcggcatgaccaagcaggtggtccaatccatcgccgccttcttcaagggggaggacttcaacgtcgtcgtctgaaaaaataaccgggaagcagcatatgcgcgcggtcggtgaggttaggtaggttgaacagcatgcagaccatactcgattccgccgatcggccggcgcacgacgccttcgtcgaaaagaaatcggaattcatcggagacgcctgtcatatcagctcgttggatgaggcgctcgctttcgttcagacgattcgtgatcggcatccgaaagcccggcatgtcgcctatgccgcggtgtgtggtggatccgatggacgtcttgcggaacgcatgagcgatgatggcgagccgtccggaaccgccggcaagcccattctcgacgtgctgcgagcaaacgaaatgactgattgcgtggtcgcggtcacacggtatttcggcggtatcctgcttggttccggcggcctgattcgtgcgtattccacaggtgcgtcaattgcggtccaggctgcttccaaggcgaaaatcgtaccgtgcggcgaatatcaggtaactcttgattatccgcagttgggcagcttccagaatctgttgtcaacggtggaaggcgagcagaccgacgcgcagtacactgaccgcatcgccttgactgtggtggttccgcaggaacaggcgaatgtcttcgaatcccgagttgtggaaactttcaacgctacggtcgttccgcgactggtgggcacgtccaaccgtccggtcaaagtatgagttcacgttgtgagccgcatgcatatagtgtcgtaaggtgaaaatatgagtgatgagaacgagcagcatgagaatgattcgcaggccgacgcctcgaacgccgatgagaccgtggatttcgagccgttgaccgccacatacgagcggctccggcattccgctgattccgccgcattaagcgagttcgccagacgtccgctgccggaccggagcgaccaggcggcgttctcccgtgccaccgcattgcttgaggctgtggctggcaacgcgcatacgccggtggaggaccgcgtcttccttgccgaaaccatgccgttcccgaacattctggtcaagctttccaccgacgagtctcctgaagtacgcaaagccgttgcgggaaacgccgatgacaagaactggctggtgggccgactgaccaaggatgagtcgcccgaagtgcgtgccaccgcgctgcgcaacaaacgtacgtcttggaaaatgcgtcttgaaggcgccgaagattccaccatggattccgacacgcttgatttcctgggctcgttgggaacgcaggtcgaaccggacgctccggtggtgcttgcgaccatggtgcgcagggccgtcgccttgaatccgaatgtttccgatcggatgctccagcagttggcgcaggacgcttcaagcgacgtgcagaaggccgctcaacggcagcttgcggaaaaataattgcatacgttgtcatttttatgagattcctgcgcgtggtgcgcatgttttggtcctagactgggaaccatgacagaacagaccgaaaacgcaacgcgtctcgcccgtccgctcattcgtctggcaaagctggtgggtgtcgccaccagctacgtcggtatgagccatgattaccacgaaatcgaagacgatgttctagtggcggtgctcaaggcgcttggtattgacgcttccaacgatgaggcgatcaaccagtccatcacatccatcaagtccgaacgcgaaacgcgcgtggtggctcccaccgtgctgcatatcgtgggcaaggaaagcaaggtggaggtgcacggcggtatgttcgatgtgccggaagcctccatcacgctggaaaacggcaagcaattcacgggcaaaatctcccatgagggcggtgagaaaatcgcccatgagattgatggcagcttcttcttcacgtcgtatctcgtcctgcccgccgatctgcccgaaggctatcacaccctcgaggtcactgtcggcaacgaggcggagaatgcaaccgttatcagcgctcctgagaaaatcgaactgctcgatgatatgaagaacggctccctgtgggggtggatgagccagctgtactccatccgttccaagggatcctggggcgtgggagacttcgaagatctgaagaccatgctggtcgaggccaaaaagaagaccggctccgacttcatgcttatcaacccgatgcacgccgcggagccggtgcctccgctgacgccatcgccgtatctgccgatttcccgccgtttcatcaatttcagctacatccgtccggagtccatgccggaatatctcacgctgtcccacgaggacagggctgaagtcgatgcgctgcacgagcaggtcgaatcgctgaatgacgacgcgcggctgatcgatcgcgacgccatgtggcgcgtcaagaagcatgcgctgtgggtcatctacaaggccggccgaaccaaggctcgccaggccgaattcgaccgttacctcgccgaatgcggagacgagatcgaatcctacgccacctggtgcctgtgctacgacaagtggggagctccctccgacgacgccgataattgggtgcacaaatacaaccgtgattccgaagaagtcgcgcagttgcgtgagaagttcccggacacccttgagttctaccgctggcttgagtgggtcgccaccgatcagttgcacgcggcgcagcaggccgcccgcaaggccggtatgaagatcggcatcgtcgcggatatggccgtcggcgtgcatccggcaggatccgatgtgtggtggaatccggaacgcttcgccaagggcgccacggtcggtgccccgccggacatgttcaaccagcagggtcaggactggagccaaccgccgcttaatccgattgcccttgaacagaccggtttccgggtgtaccgcgatatggtgcatgacatgttcgccaatgccggtgcggtgcgtatcgatcatatccttggtctgttccgcctatggtggattccggaaggcaagcccgccactgatggcacatatgtgcattacgattccgatgtcatgctcggcattctcgtgcttgaggcttcccgtgctggtggcgtggttgttggcgaggatctgggtgtcgtgccggcctatgtgtccaagtcgctgtccgaacatggcattctcggttgtgccgtggaatggttcgaacagatggacggtgtgttccgcactccgaaggattggcgtccgtacgcactggcgtccgtcaatacgcatgacatgcctcctgcggccggttacctcgaatacggccacgtcaagctgcgtgaacagctcggcctgctgtccggaccggtggaggaattccagaagtccgcaaccgccgagcacaatgccatgctgaacatgctggtcgaggagggctatctcgacaaggctgctctggatgacgaagccgccaacgaaaacgagattatcgacgcgctgtaccgtggtctgaaaggttcgccctgcaagctcatggccgcctccatcgtcgacgcggtcggtgagaagcgcacgcagaaccagccgggcaccaataacgagtatccgaattggcgtattccgctggccgatggcgaaggcaacgtggtgccgctcgaaaagctcttcgacgaaccgcgtctgcaggagatcaccgccatcatgcgtggctgatcttctataggcgattccatggggtgtccacaggtccgacggtctgcggacacccttgtttttcgtgttgccgaatgtcaaggcaggcgatatactagtagactgttgtgtttccctacggggtccttcaaagcgcttttcccactcgccatcgaggactttcagggagcccacggataatgagacctgaaaaacggcattattccgcgcccaaccaacgcgtgtaatgctgatggatggtccggaacacaatatatagaaaaggtacatcgtgaaaactttcactccgaagccagctgatctgactcacgactggtacgtcatcgacgccaccgacgtggtgctcggtcgtctcgccactcaggcggcaaccctgctgcgtggcaagaacaagccgacctacgctccgcacgccgattccggcaaccacgtgatcatcctcaacgccgacaagatcgctctgaccggcaacaagttgggcaaggaactgtacatgcactccggtcgtccgggtggcctgcgtcgcgatagctacgcccagctgctcaagaccaaccccgagcgcatcatcaagtctgccatcaagggcatgctgccgaagaaccgtctggccaaggttcagctggatcgtctccacatcgttcgcggtgccgagcatccgtacgctggcatgaagccgcaggttttcgagatcgctcaggtctcgcagcaggctaagtgaaccgaagggagataagaaacatggctgaaaacaccaacgactccgcggttctcgagaccgaagaggagctcacctcgtacaccaccgagaccaacgctggcgctggcaccggtacttccaccatcgctccgggctacggcaccggtcgtcgtaaggaagccgtcgcccgtgttcgcctggttccgggcaccggcaagtggaccatcaatggtcgcaccctggaagagtacttcccggccaagctgctgcagcgtgaggtcaactccccgatcgttctgctcaagctcgaaggcaagttcgacgctatcgtcctcgttgacggtggcggcaccaccggccaggctggcgcaatccgcctgggcgttgcccgcgctctgaacgctatcgatcgtgatgcgaaccgcgccgccctgaagaaggctggcttcctgacccgcgacgcccgcgtcgtggaacgcaagaaggctggtctgcacaaggcacgtcgcgctccgcagttctcgaagcgctaaagcttacagcaagctttattcgaaacccctcggaaacctatggtctccgaggggtttcctcgttattgtgggcaagcgttagatgcgttgggcgcaatgggctcgttagatgtgttggacgtattctggcagacgttgcagatgaagcatccgcatctccctcattcgcggcccacccgttaccggacgtttcggatgggccgtttgcgtattgatgtatgcgccgattcgttgcgccgtccgctgcgcgtcaatccgtcgaaatctgcttcatcgcgctgatgctcagagccggcagcgtccacagggtcggatcgtcctcggacaacccgtcgtcagcggagttcagactggcggcattctcatccatctgccaatacatggtattgagacgctgcagatggttgcggaatcgcccggcaggtttgtcctccgcttcctcatcgaactcggccagcttctcgatctgcgtgccctgtccgggatattcgccggcgatttccgccgaggaccagatcatttcccattcgatgtcgttgggcagatggaatctgacgttctcgtcggacccattgaccagaatgagcaggcttggctcgtcgggggagagcagctgcatggcgaacgatcggaccgagggattcgtccaatccgcatcatgcggcgtctttccgttcggcaggaaccagtgcacgcggtcggatttcttcaacagtccgattttgctcagtcgggtgaagaaatcctcatggttgtagaggtcccgggcctttctcagcgctatcagccgggaagtgaggttgaacagcttgagctccgcggtctgctcggtgctgtacagccaatcccaatccagccatgtggtctcattgtcctgcgtgtaggcgttgttgttgccgttctgcgagttgccgaattcgtcgccggcaagcagcatcggcgtgcccagggagagcagcagcgtgcccagcatgttcatgatggcccgttctcgttgctgtgtgatgatcggatcactgcacgggccttcatgtccgaaattgacggaatggttgttgtcgctgccgtcccggttgttctctccgttggcttcgttgtgcttatgccgatactgggtcagatcggcggtggtgaagccgtcgtggcatgccacgtagttcacggatgcggtcgatccgcgtccggggtcggtggcgaacagatcggctgagccgcataggcgcgtggccatggactgcatggtcatgtcgccggtttcaccaccacgtgcacgttccacatcggtcagccagaaggtgcgtgtgcaatcgcggaagcggtcgttccattccgcgaaggggatgccgaattgtcccgttctccagccgttcgggccgcaatcccacggttccatgatcatcttgaggttgccgagcagcagatcggagcgcaacgcgtacaggaacgggtggtatcgcgtgaattcgccgtcaagacgcgccagcgtcgccgcaaggtcgaagcggaagccgtcgatgccgattcgcttggcccaatagcgcaacgaatccacggcgaacgtggtgacgtgcgtgttggtgaaatcaagcgtgttgccgcaaccggtggtgtcgtacaggcggctgatcttgtctttggtgcgtcggtagtacgagagattgtcaaggcctcgccagcaaatggtcgggccttcggggcctgattcgcaggtgtggttgtacaccacgtccatgatgacctcgaaaccggcctcatgcatggcccgcaccatgtcgatgacctcctgccgcacggcgcccgctcccgcttcctgcgcctgcttggtggcgtacgaggcttcgggggcgaagtagccgagcgtggaatagccccagtaattcgtgcgattgcgttcctgcaggaacagttcggattgcttggcttggatgggcagcagttcgatggatgtcacgccgaggtcctgcagataggagagcgtggccggatgggcgaggccggcataggtgccgcgcaattccggaggaagccatggggcgttcgcggtgaatcctttgacgtgcagttcgtagatgacggttttgctccatggcacatgcgggtgggatggttctcccatatgcttgttgatgtcgcggtcgtcaatggccacggaaacaggcatgtgtcccagagagtccacggtgctcatcggtccgaacggcgaaccggcgaccttgccgtttttgatctcgcattcgtaggcgaaggcgcccgggtcgagttccatcttgccttcgatgcctttggcgtatgggtcgagcagcagtttgtatggattgaagctcacgccatggtttggatcccatgggccgttgacgcggtatccgtattgcatgccgtcccatgcttgcggcacgtgcacgtaccacagtccgtagttgggaccgtccatgcggaacagtgtttcgcgaagattgagcgagggaatgcgtctggtgcagatgcgctgttttttggcctgatcgatgaacgtgagtccgggttcgttgaacagccgtgcggcgtcggcatagaaggcgctcggttggtcaagtggttcaagtacgcaaaaccacacttggtctgctgtttctgagcggacaacggcgtccgcgccaccatcgtcggtgaaatagagacctgggcgggttgcgtagcggtgcaaaggtgggttcttcataacctcattctaaacactttgaaattatctgttgacttgttatgtcgaggctgtcgacgctcgtgccggtctgatccagccgtgagcttgaactcgagcaggtgcaggacttcctcgacggcaaaatcgccgccgcttccaaggctgtcgtcaaaatcggcgccggacgctgtttattcgtcctgaacagcttggaattagcgaaaaagtatcacgacatgacggcaaatgcgccgccgacatcgccgcatagcgcatatcctaatcacaaaagggaaaaatcaatcgtattcatcgttatcaggaggtaattttatgacgaaagcaatgtctgaattcactaccgatctgcagcattccggtatgccggcgaaggatctcgacgaaaccatcgaattctatacgaagaagcttggtttcgaactggccggactgttccataacggcgaaaatcgttgcgcattcctgcgttacggccatctgaccatcgaaacgtgggagggtgatccggctccgctgaccactggtgccatcaatcattgggcattcgacactcccgacatcgaagctgcattcgaaaacgcgaaggaactcgggctgaatttcaaagataacgaaatccagcatatcgacagcttctgggagcatggcatccgctacttcaacgtgtacggaccgaacggcgaaaccattgaattctgtcaaattgtcaaataactatcgttagatgattgctgtcaaataatcgttgaaaacaaatacaacaggcgaaacagacggaagcaaacaaagaagcgtgcgctgaaccttatatacgggttcggaacacgcttcttttttgttatgcaatcgatgcgactaatgcgattaatatgtgcgcaaaagcggtcacatatcgcatagttcgcgtacgtacggctccacaaaacgcagagccgcgccgataatgtcttgatggtcgagcgccattcccttgcgcagggtgaaatccgtggtgccgaatggcgtgtgttccaccacgcgttcgcgtagtccggccatatcgtcctcatcgagatattgtgctgcctcaccgctgatgatcacgtcaccggccagtaccgagcgaatattcgttaccgccagcgccacataatccagccattgcgagaatcgttcgcgatgctcctgctcgccttgttccaacaccgagaagaagccgggcaggctttcgccgtcttccatcagcgtttccggcgagcaatacgtatccatgcagccctgttgtccgcagtagcaggtgttgcctcctggaatcagcgtcatatgttcgattgagccattgcattggttgggcccttggtagagcgatccgtctacgatgaccgcgcctctggggcgtcgctcgaggtagatgcagacggcatccttcagattgtggtcgaaccagagttccgccatggcagaagcgtcggaatcgtgaatcatcagcgacggatagttgaggccgtggctgagttcgttgagtttcaggccggtgttgttcatgattttgccgaaggtgatcgactgcccgtctgccgatacgatgccttgcatgcagaaggccacgcctcgcaccgtgctgccttgtttcgccagttcctgcgcgaaatcgttgatgatgccgttcatgcgctggtagtaggcgtcgttgttgcgataggggagtgtgcgctgtctggtggccacggatttgccgttcagatcaatggcgatggccgtgattcgtgtggtttggattcgcacgccgatagccacgctggagtgtgccgcgaattcgtagatttgcgctttgcgtccaccggtggattgctgcatctcgcctttgacgatgagcccgtcggcctccatggcgcgcagattctgcgtgatggttggcaggctgagccctaattcgtgttcgaacatctgcttggtggctgaaccttgggtgtagatgaacgcggtcatggccttgagattggcttctttgactgatagggcggattgggctttcactggttgatccttcctgcgcaacttcttttccaagattacttcataaaagtcctttccttatgtctcgtgttggtctgagatatcaggtattgcaaaaaagtatcaaaaacagctgtgcataaaggattttctgccacttttctgcgtcgaaaatatatttatcaacaaaaaagttgagacggtgacaacgacgttctaccaagaaaagagacatgttatgaagataggtctgccgcgcacgctattggccggcttggtcgccatagcggtgttcatgaccggcgatggctttgaattgacttttttgtccaaatacatcgtggaccagggattcagctcttcgcaatcgtcgctgatgttcaccatgtacgggctggtggctgcgcttgccggctgggcgtccggtgtgctagctgaaatgttcggtgccaaacgcatcatgcttatcggcgcgagcgcctgggtcgttttgcacctgctgttcgttggtgtggcgctgccgagcggcgtctatccgctgatgttaggcgtgtatgcgttgcggggtgttggctacccgctgttcatctactcgttcgtggtgttgatggcgcaaaccatcgatcctgccaagctcgcgtcggccatggggtggttttgggccgcctactcgttcggcatcggcgtgtttggcgcatatttgccgagtttcaccattccgatggtgggcgagtactattcgctgtggctttcgttgccgttttctatagctggactgctgatttgcctgctgatggtgccgaaaagcaagggttctggcaactcttccatgagcaatgcagacaagctgcgcgagcttagtcgaggagtcaccattctggtgcataatcgccaaatcgctttggctgcggtggtgcgtgtgatctgcaatctgacgttgtatggctttcccgtcatcatgccactctacttggccactaccaacaatggcggcggcgcttggtttaaggtttcgcaatggagccagatttggggattccagtttgtggtcaccattttcggcaatgtgttctggggtcgtatgggcgattcgcatggttggatgcggcaaatgcgctggtttggctgctggttctgtgtgatcggcacgctgggcatgtattacattccgcagtttttcggggcgaatatggtgcttatgtgtgctgatgcggttgttcttggattgggaatttccgctttcgttcctatgggagccgtgtttcccgcgttggcgttggaacataagggtgctgcgatttccgcgcataatttcgcttccggcctggctacgtttttcggtccgctgattgcgacggtgctggtttccactatcggattcggcggcgtgtgctggacgtatgcgatctgctatgcgatcggatcgttggtcacgttcggcattcatcctcatcaacccggatttgacgatcgcggccatcgcattgccgcgatcgagcgtaactaatcgcaattgaatatcaattgctcgatcatcatttttctcaaaaaacatcattatccacaaaggagaataatcatgaaggcagtcgttctcgaagagcagggcgtcatcaatgtgcgtgaggtgcctgacgtccccgcacctggtctaggcgagctgaagatcgcgccgcataccgttggtgtgtgcggttccgacctgcactattacactcatggtcgcgtgggcaaatatgtggtggagcagccgatgattctcggtcatgaggcttccggcacggtggttgaggtcggtcctggcgtcgaaggcttcaaggtgggcgatcgtgtggccatggagcccggcattccggatatgagttcgcgtgccagcaaactgggcatgtataacgtcgatcctgcggtgcgtttctttgccactccgccgattgatggctgcctgtgcgaaacggtgaaccatcctgcggcgttcacctacaagctgcccgacaatgtgagcttcggtgagggtgcgctgcttgaaccgttggctgtgggcatgtggtccgccaccaaggctcgtatcaagccgggcgatgtctgcgtggtcaccggatcgggcacggtcggcatgctgaccgcgtcgtgcgcgttggcaggtggtgcttccaaggtgctgatttctgatgtgtcggcaatcaaactggcgattgcggctcagattccaggtattattccggtggatctcaccaaagaggatctggtggagcgcgtccgtgaggaaacggggggttggggtgctgatgtggctttcgagtgctcgggctcgccgaagtcatacgagacattctggaagctgattgctcccggtggcgctgccgttatcgttggcattccggtcagtccggtggctatcgacattacggaactgcaggctaccgaggtgcgcatcgaaaatatcttccgttatgccaatgtgtatcagaaggccattgacctcgtggctaacggtaaactgaatctgaagccattcatcaccgacacctatgcgatggaggatgccaaggcggcgttcgatcgcatggccgaggggcgtcctggagatattaagctgcagattaccgtgaataacgactgacgttacgcgcgttacggaacgacgaaaggggtctaggccatgggtgctgttgtacaagtcaacgataatcggcatgggaaggcggctttggctcagacctcttttggtggattcgtgccgaaaggtggaagttcgaacgattccggcgtattggagatcattgtgccggacgcgcaggcttcggtgcgttgggtgaagcatggctacccaagctcgttggcgaaatggcatcatcatcctcatattgaaattcatctgattcgggaaggtaccggattgatgatggcgggcaatgccgttgttccgtatgaggccgggcaggttgcgctgattggttcgaatcttccgcataattgggtgtccgacatcgctccgggggagcggcttcgtcagcgtgatgtggtgtgccatgtgcgtccggaaaccatacgtctgctgatgtctggatttccggaaacgtctggttttgcaatggtgttgaggcgtgcggggcaggcgttggtgctgagcggtgaatccgctcgtcaggccggttcgattctggaaagcatggaggaacatagtcttgcttgccgtgttagtgatctgattcgtgtgttggatgtgttcgcgcatgcctcagcagatgaatcctatacagtggttgcgtccggatacgatccggctgtatgcagtggtgcggaaagtgtggtcaacgatgccattgagtacatttcctcgcatctgagcggtgaaattagcctggatttggccgctcgtcaggctggaatgagtgtgtcggctttctctcgtctgttcaaaagggccgcaggaataaggttttcggattttgttcgacgattgcgtatcgggcatgcgtgcagattgctgacgaccacgaatcaaagcgtcgcgtcgattcgtcgtgcttgcggatatggaaacgcttcgaatttcaatcgtcgtttctttgaagaaacaggcgaaactcctactggctggcggaaaaaatacattggacggacaagataagtaaataaactttgtaaaagtttgatatgattgatatcatatagaaaatacttttataaaagatgaggaggtgagacttgagaaagtgtgtgtgatttatgataaaaagcaacaaaaacgctcaaaatgatgtttttaaagctttttctcttcacaaaagaacgcaatctaaacattaaatgaacagaatataatatttctcttgcgacacgacgcagtggaaaatcatattgcatactcgctaaagtgtgtcctgggtcacaaaagaccagcaacgcgtccatccgcttcgaggtgggtggaataacgggaaactactttgcaaacccccaaagaatcgaggaggacttcaagtggcagacgcaaagaaggaagagccgaccaagccgactccggaagagaagctcgccgcagccgaggctgaggtcgacgctctggtcaagaagggcctgaaggcccttgatgaattcgagaagctcgatcagaagcaggttgaccgtatcgtcgccaaggcttccgtcgcagcgctgaacaagcacttggtgctcgccaagatggccgtcgaggagacccaccgtggtctggtggaagacaaggccaccaagaacatcttcgcctgcgagcatgtcaccaactacctggccggacagaagaccgtcggcatcatccgcgaggacgacgtgctgggcatcgacgagatcgccgagccggtcggcgtcgtcgccggcgtgaccccggtcaccaacccgacctccaccgccatcttcaagtcgctgatcgcactgaagacccgctgcccgatcatcttcggcttccacccgggcgcgcagaagtgctccgtagaagccgccaagatcgtgcgtgacgcggccatcgaggcaggcgctcccgagaactgtatccagtggatcgagcacccgtccatcgaagccaccggcgccctgatgaagcatgacggtatcgccaccatcctcgccaccggtggtccgggcatggtcaaggccgcatactcctccggcaagccggccctcggcgtcggcgctggcaacgctccggcatatgtcgacaagaacgttgacatcgtgcgcgccgccaacgatctggtgctctccaagcacttcgattacggcatgatctgcgccaccgagcaggccatcatcgccgacaaggaagtctacgctccgctgatcaaggaactcaagcgtcgcaaggcctatttcgtgaacgctgacgagaaggccaggctcgagcagtacatgttcggctgcaccgcatactccggccagaccccgaagctcaactccgtggtgccgggcaagtccccgcagtacatcgccaaggccgcaggctttgagattccggaagacgccaccatccttgccgctgagtgcaaggaagtcggcgagaacgagccgctgaccatggagaagcttgctccggtccaggccgtgctgaagtccgacaacaaggaacaggccttcgagatgtgcgaagccatgctcaagcatggtgcaggccacaccgcagccatccataccaacgatcaggctctggtccgcgagtacggccagcgcatgcacgcctgccgtatcatctggaactccccgagctccctcggcggcgtgggcgacatctacaacgccatcgccccgtccctgaccctgggctgcggctcctacggcggcaactccgtgtccggcaacgtccaggcagtcaaccttctcaacatcaagcgcatcgctcggaggaacaacaacatgcagtggttcaagattccggccaagacctacttcgagccgaacgccatcaagtacctgcgcgacatgtacggcatcgaaaaggccgtcatcgtgtgcgataaggtcatggagcagctcggcatcgttgacaagatcatcgatcagctgcgtgcacgttccaaccgcgtgaccttccgtatcatcgattatgtcgagccggagccgagcgtggagaccgtcgaacgtggcgccgccatgatgcgcgaggagttcgagccggataccatcatcgccgtcggcggtggttccccgatggatgcgtccaagatcatgtggctgctgtacgagcacccggaaatctccttctccgatgtgcgtgagaagttcttcgatatccgtaagcgcgcgttcaagattccgccgctgggcaagaaggccaagctggtctgcatcccgacttcttccggcaccggttccgaagtcacgccgttcgctgtgatcaccgaccacaagaccggctataagtacccgatcaccgattacgcgctgaccccgtccgtcgccatcgtcgatccggtgctggcacgtactcagccgcgcaagctggcttccgatgctggtttcgatgctctgacccacgcttttgaggcttatgtgtccgtgtatgccaacgacttcaccgatggtatggcactgcacgctgccaagctggtttgggacaacctcgctgagtccgtcaatggcgagccgggtgaggagaagacccgtgcccaggagaagatgcataatgccgccaccatggccggcatggctttcggctccgccttcctcggcatgtgccacggcatggcccacaccattggtgcactgtgccacgttgcccacggtcgtaccaactccatccttctgccgtacgtgatccgttacaacggttccgtgccggaggagccgaccagctggccgaagtacaacaagtacgtcgctccggaacgctatcaggagatcgccaagaaccttggcgtgaacccgggtaagactccggaagagggagtcgagaacctggccaaggctgttgaggattaccgtgacaacaagctcggtatgaacaagagcttccaggagtgcggtgtggatgaggactactattggtccatcatcgaccagatcggcatgcgcgcctacgaagaccagtgcgcaccggcgaacccgcgtatcccgcagatcgaggatatgaaggatatcgccattgccgcctactacggcgtcagccaggcggaaggccacaagctgcgcgtccagcgtcagggtgaggccgccacggaagaggcttccgagcgcgcatgagtcacctcgcatatataggtcatcgatattgatttatatatagggtacttgcgttacatcgatagacgctatcgataacgaggaattcggttggatttgttcaatcgaattcctcgtttttatatatagaaaagcattttcggatgatgctgcatcatgatcgcaaccgacgatcagcaatgtgcatcgcattcgttttcaaggacttgaaaaacgggacttgagactgcgacacgcgaggatttcttaagactacccctgatgcttaaataaagaagttgcctgattttagggctcgcaaattgtaattcaaaaagcgagcgtggcacagcggctcactccggtgagaagctgcatggctgcgcactgatgtggtatggccacggaacttccacggttccgggggtcttctgcgccggtgcccttggaagcaggctggtaaacagtaaataacgaatcgctagaaagggcggaaggcaatggcgggacagaaaatccgcatcaggcttaagtcctatgaccatgaggtcatcgaccaatcggcgaagaagatcgtcgaaacggtgacgaacgcgggcgcaactgtggttggcccggttccgctcccgaccgagaagaacgtgttcgtcgttatccgttctcctcacaagtacaaggattctcgcgagcatttcgagatgcgcactcataagcgtctcatcgacattgtggacccgaccccgaaggccgtggactccctcatgcatattgatctgcccgcagacgtgaacatcgagatcaagctgtaagggaggagggaaccattatgtctaatcgcactgcactgctgggcaagaagctcggtatgtctcaggtctgggacgagaacggtttcttcgttcctgtgaccctcgttgacgtgtccaccaacgtggtgaccgctgtcaagtccgaagagtccgacggctacaaggctgttcagcttggctacggccaggttgacccgaccaaggtgaccaagccgctcgccggccacttcgccaaggctggcgtcaccccgcgtcgtcacctcgctgaggtccgcaccgataacgccgaagagttcgagccgggtcaggagctgaccgctgagctgttcccggaaggcaccctggtcgacgtgaccggtaccaccaagggcaagggcttcgcaggcaccatcaagcgttggggcttcaagtcctatcgtcgtactcacggctctcacaagaacgagcgtcgtcctggctctgttggcgcatgcgccaccccgagccgcatcctcaagggcaagcgcatggctggccgcatgggtcatgtgaccaacaccgcgctgaacctcaccatcgtttcgtcggatgttgagaacggcgtgctggctatcaagggcgccattccgggcccgaagggcagcatcgttctcgtccgttcggcagtgaagggagcctgataaatcatggcaaacgttactctgaacgtcaccgataaccagggcaaggccaccggcaccgtcgatgccccggctgagatcttcggcttctccgctgaagaagttcagtcccgcatcccgctgatccaccaggtcgtcatcgcccagctcgccgctgctcgccagggcacccacgccaccaagactcgtggcatggtttccggcggtggccgcaagccgtggaagcagaagggcaccggtcgtgctcgtcagggctccatccgtgcaccgcagtggtaccacggcggcaccgtgttcggtccgcagccgcgtgactactcccagcgcaccccgaagaagatgaaggccgctgctctgaagtacgtgctttccgatcgtgccaatgccggtcacgtggccgttgtcgacttcggtgtttccgaagccccgtccaccaaggccgccgttgccgctcttaccccggtgaccgagaacaagttcaccaccgtggtgctctctcgcgagaatgtgaacgaatggctttccgttcgtaacatcccgaccgttcacccgatcttcgccgatcagctcaacacgtacgatgtggtcaccgctcagtacgtggtcttctccaaggaaggctttgatgctttcctcgctgcgaaggctgagccggctgcaaaggaggcctgattttcatggtcgctattcacaagcccgcacacgacatcatcctcaagcctgtcgtttctgagaagagctacgctctgtccgatcgcggtcagtacaccttcgtggtggccccgaacgcgaacaaggttcagatcaagcaggcaatcgaagagatcttcaatgtcaaggtgacgaacgtcaacaccctcaaccgcgccggcaagcgccagcgcacccgcaacggtttcggccagcgcgtcaatcagaagcgcgccatcgtgaccgtcgccgagggccagacgatcgacatcttcggtaactgaaggctagccgagaaaagttaaaggaagaactagattatggctatccgcgtttataagccgacgactgcaggccgccgtaacgcgtccgtctcggacttctccgagcttacgcgctccacgcctgagaagtcgctggttcgcaagctcagcaagactggcggtcgtaactcctacggccgtatgacctcccgtcatcgcggcggcggtcacaagcgccagtaccgtctcatcgacttcaagcgttgggacaaggacggcgtgccggccaaggtcgctcacatcgagtacgacccgaaccgttccgcccgcatcgcactgctgcactacgcagacggtgagaagcgttacatcatcgctccggaaggcatcaagcagggcgacgtcatcgagaccggcgctcaggctgatatcaagccgggcaacaacctgccgctgcgcaacatcccgaccggtaccgtggtgcacgcgattgagctccgcccgctgggtggcgccaagatcgcccgctccgccggtgctgccgtgcagctcgtcgccaaggatggcgcctacgctcagctgcgtatgccgtccggcgaaatccgcaacgtggacgctcgctgccgcgcgaccgttggtgaggtcggtaattccgatcacgccaacatccagcttggcaaggcaggccgcgctcgttggatgggcaagcgcccgatcacccgtggtgagtccatgaaccctgtcgatcacccgcacggcggtcgtacccgcggtggcaagccgccggtttctccgtggggcaagggcgaggttcgtacccgccgtccgaagaaggcttcgaacaagatgattgttcgtcgtcgcccgaatggtaagaaccgtaagtaagggagtgtcgagtagatgactcgtagcatcaagaagggccccttcgtcgacgcccacctgcagaagaaagtcgacgagcagaacgagaagggtacgcacaacgtcatcaagacgtggtcccgtcgttcgatgatcacccctgatttcatcggacacaccttcgccgttcatgatggccgcaagcatgttccggtgttcgtcaccgaatccatggttggccacaagctcggtgagttcgccccgaccaagaccttcaaaggtcatgtgaaggacgacaagaaggcacgccgctaaaggagagtaaggacacatggaagctaaagcaatcgctcgtcacgtccgcgtgacgccgcgcaaggctcgccgtatggtcgacctcatccgaggcaagaaggcgaccgaagccatcaccattctgaagttcgctccgcaggacgcatccctcccggtgcgtaaggtcctggagagcgccatcgcgaacgctcgtgtgaaggccgacaaggccggcgagccgttccgcgagaacgacctggtcgtgaaggagacctatgtggacgaaggcgtgacgctcaagcgtttccgcgcccgtgcacagggccgtgccgctcgtatcaacaagcgcaccagccacatcacggtcgtcgtcgctaacaaggaaggaaaccgctaaagatgggtcagaagatcaatccgtttggctaccgcctgggaatcactgagaaccatcgttccaagtggttctccgattccaacaaggttggcgaacgctaccgcgacttcgttctcgaagatgacgccatccgcaaggccatgagcaaggacctcgagcgtgcgggcgtgtcccgcatcgtcatcgagcgtacccgcgaccgcgtgcgtgtggacatccacaccgctcgtccgggcatcgtcatcggccgtcgtggcgctgaggctgagcgcgttcgcgccaagctcgagaagctcaccggcaagcaggtccagctcaacatcttcgaagtgaagaacgccgcactggacgcccagctcgtcgcacagggcatcgctgagcagctcaccaaccgcgtgaccttccgtcgcgcgatgcgtaaggcccagcaggatgccatgcgtgcaggcgccaagggtatccgtatcaagctctccggccgccttggtggcgccgaaatgagccgttccgagttctatcgcgagggtcgcgttccgctgcagaccctgcgtgccctcattgattacggcttcttcgaggccaagaccacttacggccgtatcggcgtgaaggtctggatctacaagggcgatatgaccgagcgtgagttcgaagagcagcaggcacagcagagcaacaaccgccagggccgtcgcggcgatcgtcgtccgcgtcgcggccagcgcaacgctgctccgcagcagaacgcagcagcagaggctccggccgctgctgaggcacctgccgcaacggaaacgaaggagtgagctgagaatgcttatcccaaagagaaccaagtatcgtaagcagcaccgtccggtccgccgtggcatgtccaagggcggcaacgagatcgctttcggcgatttcggtatccaggctctggctccggcttatgtgaccaaccgccagatcgaggccgctcgtatcgccatgacccgctacatcaagcgtggtggccgcgtgtggatcacgatcttcccggatcgtccgctgaccaagaagccgctcggcacccgaatgggttccggtaagggtactccggaattctggatcgccaacgtccacccgggtcgcgttatgttcgagatcggtggcgtgtccgaggatgtcgctcgtgaggctctgcgccgcgcaatcgacaaactccccatgaagtgccgtgttattgctcgtgaaggcggtgacatctgatggcagtcggaactgcagactacaccatgaagaatctcaacgagaagaccaacgaggagatcgagggcttcctcaagaagtccaaggaagagctgttcaacctgcgcttccagtccgcgaccggtcagctcgaaaacaccgcccgcctcaaggcggtcaagcacgacatcgccaggatgtacaccatcctgcgcgagcgtgagctcggcatcagccaggcccccgaggcgaccgaaacgaaagctgaggagaagtaatggctgaagagcgtaacttccgcaaggttcgtcgcggttacgtcgtgtccgataagatggacaagacgatttccgtcgagctcgagcagcgttcgacccacccgctttacggcaaggttgtgcgctccactcgtacggtcaaggtccatgatgaacacaacgaggctcacattggcgacctcgtgagtattatggagactcggcccctgagcaagaccaagcgttggcgtctcgatagcattatcgagcgcgctaagtaaataagttcggcaaggctccgtgagtcaccccgcctgcttctagcaggcaggcggggtgcttggggagaaccagctcggctaaggagaatcaatgattcagcaggaaacgcggcttcatgtcgccgacaacacgggtgcgaaggaactcctcgccatccgagtgctcggcggatcgaagcgacgctatgccggcatcggtgacgtgatcgtcgcctccgtcaaggacgccatccctggcgggtcggtcaagaagggcgacgtcgtcaaggctgtcgtcgtccgcactgtcaaggaacaccgtcgtgtcgacggctcctacatcaagttcgacgagaacgccgccgtcattctcggctctggccgtgaaccgaagggcactcgtatcttcggaccggtcggtcgtgaactgcgcgacaagcgcttcatgaagatcgtgtccctcgccccggaggtgatctgacatggcagccaagattaagagcggcgacctggtcaaggtcatccgcggcaaggatcgcggcaaggaaggcaccgtcaagcaggtgctcaaggacgatcgtctgatcgtcgagggcgtgcagatcgtcaagaagcacgtccgcgccacgcagcagggccagcaggctggcatcgtggctgtcgaggctccgattcatcgctccaacgtgatggtcatcgatccggagaccaagcagcccacccgcgtgcgcatcgtcgaaaaggaagaggctcgtgacggcaaggtgaagaccgtgcgcgtacgtgtcgccaagaagtccggaaaggagctggcatgaccgataccactgtcgaagcgccggcaactccgcgcttgaagcagaagtacaacgagcagatcgtgccggagctggagaaggaattccactactccaacccgatgcaggtcgctcgcgtccagaaggtcgtcgtctccatgggcgttggtgccgcggctcgcgactccaagctcatcgaaggcgctgtcaaggacctcactctgatcaccggccagaagccgaagatcaccaaggctaagaagtctgtcgcgcagttccacctgcgtgagggccaggccatcggcgcctacgtcaccctgcgtggcgagcgcatgtgggagttcctggatcgccttctgaccatggctctgccgcgtatccgcgatttccgcggcatcaacggcgaccagttcgatggtcagggcaactacaactttggcctcaccgagcagtccatgttccacgagatcgatccggattcgatcgatcaccagcgtggtatggacatcaccgtggtgaccagcaccaaggacgacaaggaagctcgcgtgctcctgaagcacctcggcttccccttcaaggagaactgatatggcaaaaaccgctcttaagaacaaggcggccgctaagccgaagttcaaggtgcgcgcctatacgcgttgccaggtctgcggtcgtcctcactccgtctaccgcaagttcggcctctgccgcatctgccttcgtgagaaggcccaccgcggcgagctgcccggcgttacgaagtccagttggtaaatatcgacgctgaaggtccgcggcccgatcgcctctaaggcgtgagggcggcggaaaccatggcgagaaagggcgttagcccaaatgacaatgacagatccgatcgcagacatgcttacgcgtctgcgtaatgcgagcgcggcaaagcacgagaccgtggatatgccgtactccaagttcaaggcgaacatcgctgagattctgaagcgtgaaggctacatcaaggacttcaccgccaaggaagccaaggttggccagactcttgaggtcaccctcaagtacggtccgaacggcgagcgttccatccagggcatcaagcgcatctccaagccgggcctgcgtcgttacgcaaagtccgatgctctgccgatgccgctcggtggccttggcatcgcaatcatctcgactagctcgggactgctgacccagaaggaatgcctcgaccgaggcatcggcggcgagatcgtcgctttcgtttggtgagaaaggagagctgaaacatggcatcgcatattggtaagctccccgtcaccattccggctggcgtggaagtcaagatcgacggtcagtcctttaccgccaagggcgctaagggcactgactcctacgagattcctgaaggcatcaccgcagtggtcgaaggcaacgaagttgtcctcaccccggctgatgacctgcgtccgacccgtgcaaagcacggcctggctcgctccatcgtggcgggcatggtcaagggcgtgcacgagggttatgccaagactctggagatcgtcggtaccggttaccgcgcccagatgaagggcaagggcattgagttctccctcggctattcccacaccatcaccgtcgagccgccggcaggcatcgaattcgaactgccgaacccgaaccaggtgatcgtcaagggcatcgacaagcaggctgttggccagtgcgccgctaacattcgtaagcttcgtgctccggaaccctacaagggcaagggcatcaagtacgcggatgagcacattctgcgcaaggctggaaaggctggtaagtaatgagcgtccagattctcggtaagggcaagaaggtcgcgcttaagcgccgtcacgctcgtctgcgcaagcacatcagcggtaccccggagcttccgcgtctggtggttacccgttccaaccgtcacatggttgcccagatcatcgatgacaccaagggcgtcactctggtgagcgaatccactctgaccagcgatttcgccggtttcgagggcaccaagaccgaagccgccaagaaggtcggcgaactgatcgccaagaaggctcaggacgctggtatcaccgcggtcgtgttcgatcgtggcggcaacaagtatcatggccgcgtcgcagctgtcgctgaaggcgcccgcgagggaggtctggcactgtgagcgacaacgaaaaggaaacccaagtggctgaagaaactcagaacactcaggctgccgctgagtccaacaacgaggaccgcaagtcccgtcgtggccagcgcggtgagggtcgtcgtggcgagcgtcgcaaccgtcgtgaggaatctcacgagaacgagatgctcgatcgcgtggtgaccatcaaccgtgtgtccaagacccacaagggtggtcgtacgttcagcttcgccgccctcgtggtggttggcgacggcaagggcaccgttggtgttggctacggcaagtcccgtgaggtcccggctgcaatcgccaagggccagctggatgccaagaagcacatgttcaccgtgccgcgcatcaagggcaccgtcacccacccggtgatcggccacgatgccgctggcaccgtgctgctgcgcccggctgctccgggtaccggcgttatcgccggcggtgcagtccgcgccgtcatggaatgcgctggcatcaccgacgtcctgaccaagtcgatgggctccgccaccgccgtcaacgtggtgcgcgcaaccgtcgacgccctcaagaagctcgaagagccggaagagattgccgcacgtcgtggcatgtctctcgaagaggtggctccggacgcgctgctgcgtgctcgcgccgaaggcatcgccgaggcccgcaaggctcgtgaagaggctcaggccaaggctgctcagaaggacggtgagtgatgactaacctgaacatcaagctgcaccacggtctggtgaactccactccgaagcagcgtgctgcggctcagactctgggcctgaacaagatcggcaagaccgtgactcgtgaggacactccggcccttcgtggccagctgcaggtcctccgtcacctgatcaccgtcgaggaggctgactgattatggcagacattctgcagatgcatgacctgaagccggctccgggtgccaacaaggatcgtatccgcgttggccgtggtgaaggctccaagggtaagacctcgggccgtggcgacaagggcaccaagaagcgctatcaggttcgtccgggcttcgaaggtggccagctgccgctgtacatgcgccttccgaagctgcgtggcttcaagaacccgttcaagaaggaataccaggtcgtcaacgtggctgctcttgcggaactgttcccgcagggcggcgagatcaccgtggctgatctggttgccaagggtgccgtccgcaacggcttcccggtcaaggtcttgggcgacggcgaggtttcggctgcctacactctcaagggtgtcaaggcttccgcttccgccaagtccaagatcgaggctgctggcggctccatttccgaggactgattccaacggaatatagctgactgaagctcagacatgaggcttcccccgctttagggcgggggaagcctcattcgtttgcagtcaaaatgcaatcatgcatggaaaaacaaaaaaacagacgaataatgacgaaaacgccatatcggtagacgccgtacgctagactcgagcgttagagtctgtttttgcacgtgtgcgcaggtgcgcacgacgatggaaggaaccccaggtgaggacgttaatccaggccttgaagaccaaggaattgaggaataaaatcctcttcacccttggtatcatcatcatttatcgtatcggttcattcatcccgacccctggcgtcgattacaccgtcgtccagcagtgcgtcggcaagatgaacaacgcttctgagaactttatcggtctggtgaacctcttctccggcggcgccatgctgcagctgtcgattttcgcattgggcgtcatgccgtacatcaccgcatcgatcgtcatccagctgctgcgtgtggtcatccctcgtttcgaggcactgcacaaggaaggccagtccggcgaagccaagctgacccagtacacccgttacctgaccatcggccttgccgtgctgcagtccaccaccatcctggtgaccgcacgttccggcgcgctgttcaactaccagtgctcccaggtcgttccggacggttccgtgtggaatctcgtggtcatggtgctcatcatgaccggcggcaccggcctcatcatgtggatggccgaattggtcaccgacaagggcctcggccagggtatgtccatccttatcttcatgtccatctgctccggcttcctgccgcagctgtgggagatcggctggggcaccaacggtaccgatggcaattggggcaagttcgccgcggtcgtcggcacgctgctggtcatcatgattcttgtcatctacgtcgagcttgcccagcgtcgtattccagtgcagtacacccgccgtatgatcggccgcaagatgtacggtggctcctccacctacctgccgctgaagatcaacatgagcggcgtcatcccgccgattttcgcatcctccatcctggccgtgccgacgctgatcgcgcagttcggcaattccgaccagtcctgggtcaagtggatcaactccaacctggccaacaccacatccgtgtggtacatcgcactgtacgcgctgatgatcgtgttcttctgcttcttctacacggagatcaccttcaacccggacgagaccgccgacaacatgaagcagtacggcggcttcattccgggcatccgcgcgggaagcgccaccagcaactacctgagctacgtgatgaaccgtctgaacacggtcggcgccgtctacctgctgttcgtggcgcttatcccgacggtgctcatcatggcgctgaatctgaacaccaagctgccgttcggcggcaccaccatcctgatcatcgcaggtgtcggcctcgacaccctgcgccaggccaaggcccagaccgaacagttccagtacgctggcttcctgttcgaggacaccgaccacaaggaaggtaagtaaccacttgaatcgtgatgccgtttccgttgatcgggagcggtatcacgatttttatgttaggtaatccatcatccgaaaatccccgttgaggggaatgaacgaaacggagaacaacacatgcgactgctgatcatgggcccgcagggcgtaggcaagggcacccaggccgctctgctgagcgagcactacggaattccggcgatctccaccggcgatatcttccgctacaacatcaagaacaagaccgagctcggcgtcgaagcgctcaagtacatcgacaagggcgagcttgtgccggacgagctgaccaacaagatcgtcaaggaccgtctggccatggacgacgccaagaacggctggattctcgatggctatccgcgcaacgcctcccaggtcgaggctctcgacgccatcctgggcgagctggacaccccgcttgacgcggtcgtcgcactggatgcagatcacgacgtgctcatggagcgtatgaagaagcgcgccgaaatcgaaggccgctccgacgacacccctgaagccatcgccaagcgtcttgacgtgtacgccaaggagaccgcgccgctgctggacatctaccagaagcgcggcctgctcaagacgttcaatggcgtcggcgccgtcgacgagatccaggccaccatcgtggcggagcttggctgaaggaaaaaccaagcagaataacatatttccaacgaaagcgggaatcgcgacacgccgaacgtgtcttgattcccgctttcgtgtattcttgcaagttggtgtgtcttcgggcacgcatagtaatcgccaaggaacggaacgaggctcatggctaaagacggtgtgattgaagtcgaaggacaggtagtggaagcactgccgaacgcgatgtttcgtgttgaactcgaaaacaagcatatcgtgctcgcaaccatttcgggcaagatgaggaagaactacatccgcatcctgccgcaggatcgtgttgtgctggagatgagcccctacgatctgaaccgcggccgtattacgtaccgttacaagtaaaggtacacaagcaaaggaaaaccatgaaggtcagccctagtgtgaagaggatctgcgagaactgccgcgtgatccgtcgtcacggccgcgtcatggtgatctgcgtcaacccgcgccataagcagcgtcagggctgagagcagatccagcggcataaacagtacaggcgctgagtcacagcccgtgaaagcgggatgaaccccgggtacgcaggcccgggccgggaaaccggacgactcggtgcaagacctgcggaaaacagaaggaatcgcaatggcacgtcttgccggagtcgacatccccaatgagaagcgcatcgagatcgccctcacctacatctttggtgttggtcgtactcgtgccaaggaaacgcttgccgcgaccggtatcaatccggacattcgcgtcaaggatctgacggatgagcagctgattacgctgcgtgattaccttgagggtaactacaagatcgagggtgatctgcgtcgtgaaatcgatgcggacatccgccgtaagatccagatcaactgctaccaaggccagcgtcaccgtaagggacttcctgtgcgcggtcagcgcaccaagaccaatgctcgtacccgcaagggcccgaagcgcacggtcgccggaaagaagaaggccaccaagtaatcggtggctgacagttcaagccacgaggtgtgagcctcatcgtttgaacatcaaagcaaattcgttattaggaaacgagggtcaatggcagctcaaaagcaagccgcgcgcaagccgcgtcgccgcgaccgcaagtcggtcccggttgggcaggcgcacatcaagtccactttcaacaacaccatcatttcgatcaccgacccgtccggcgcagttgtgtcctgggcgtccggtggcgatgtcggcttcaagggctcccgtaagtccacgccgtacgccgctggcatggccgccgaatccgcagcccgcaaggctatggagcacggcctcaagaaggtcgacgtgttcgtgaagggcccgggttccggtcgtgaaaccgccatccgttccctgcagtccgccggactcgaagtcggttccatcaccgacgtcaccccgcaggcacacaacggcgttcgtcctccgaagcgccgtcgcgtctgagcactagaagaaatcatcaatccaacgccgcttatggccggtgagtgcaccaccggcctgaagctgaaaggataaccacagtgcttatcgcacagcgtccgacacttaccgaggaatctctcaaccctcagcgttcccgcttcaccatcgagcctcttgagcctggtttcggctacacgcttggcaactcgctgcgccgtaccctcctgagctccattccgggagcggctgtgacttcggtgcgtatctccggcgtcccgcacgagttcaccactctgccgggtgttgaagaggacgttaccgaaatcctgctgaacatcaagggcatcgtgctcaccagcgaatacgatgagccggttgtcatgtatctgcgcaagagcggcaagggcgaggccaccgcgggcgacatcaccccgccggccggcgtcaccatcgccaacccggacatgcatatcgctaccctcgccgaggatggcgaactcgagatcgagttcaccgtcgagcgtggccgcggctatgtgcccgcccagatgaacaagcaggataacgccgagatcggccgcattccggtcgactcgatctactccccggtgctcaaggtgagctatcgtgtggaagccacccgcgttgaacagcgcactgacttcgacaagctcatcctggacgtggagaccaagccggctatctccccgcgcgatgcagtcgcatccgcaggctccaccctggtggaactcttcggtctgtgccgtgagctcaacacccaggctgagggcgtcgaggttggccctgctcctgtggcagaggaaaccaacccggagatgaacatcccgatcgaggacctgaacctcacccagcgcagctacaactgcctgaagcgcgagggcatccacacgatcggcgagctggtcgcccacaccgagcaggatctgctcgatatccgcaatttcggtatgaagtccatcgatgaagtcaaggagaagctccagtctctgggactcgccctcaaggcttccccgctgggtaacttcgataccaataatctcgaaggtggcaccttcttctcgccggaagacgagtgatccgccacttttgacttaaccgcttcgttggattcggacgttcgggcaactgcccacctgaatccaacggggctttcaaggagaaacaatgcctacaccaaagaagggtccgcgtctggcctccagcccggctcatgagcgtcttatgctcgcgaacatggccaccagcctgttccagaacggccgcatcaccaccaccctgccgaaggccaagcgtcttcgtccgctggccgagcgtctgatcacgctcgccaagcgtggtgatctgcacaaccgtcgtcgcgtgatgcgcgtcatccgcaacaagtccgtcgtgcacaagctgttcaccgagatcgccgagcagatggagcagcgcgaaggcggctacacccgcatcgtcaagatcgctccgcgtcgcggcgatgccgctccggcagccatcatcgagctcgtcaccgagccggtgagcccgaagcaggccgtggtgaaggaagccgaagccgcaaccaaggttgccgctgccgaggctccggaagccgccgctgaagaggctaccgctgagaacgccgagtgaatcgctcttagctgattgaaggccgggaatcgcaaggttcccggcctttgtcatatctgctgccaagactgtcgtgccacatgcctcactatgccagccatttgctatgctcgatgccgtgagactacgcatcgatttggcatatgacggtaccggcttctacggatgggcgaaacagcccgaaatacgtacggtacagggcgaaatcgaacgcgtgctgcataccattcttcgcgtaccggaaggagacccgaccgaaccgctgcgccttaccgtggccggacgaaccgacaccggcgtgcacgcctcgcatcaggtatgccatctggacgtcaacgaggacgtgctcaaacgctgcgtcggccacatggacgtgccgcccgtcatcgcgcttacccgcagacttcagcgcatgctgccggccgatatcgcaatccgcggcatcgcacccgctccgaacggtttcgacgcgcgtttctccgcgttggaacgtacctacgtgtaccgaatcgccgataggtcaagcgaggtggaccctcgtaccagaaacttcgtattgcatatcgacgatgaacttgacctcaaagccatgaacgaagccgctgcgatgacgatcggcctgcacgatttcggctcgttcgccaccccgaatccgggcggcaccaccatacgcgaggtgaagaccgcgtattggcgtcgcgtaccgcagcggacgcttatcgacgacggcatgacgatgggggagcggtaccgtacgccgaccgtggaatcgggcctcgtctgcttcgtgatcgtcgccgacgcgtttgcacgcaatatggtgcgctccctcgtcaacggctgcgtgcaggtcggtatcggcaaacgttccctcgactggtttgcaggaaaaatggcggctccgctgcgcgaaggctccacaggaccgatcgcgccgcaaggactgacgctggagcatatcgaatatccggccgacgaccagctggcggtccgcgccgaagccattcgcgccaagcgcgcactgtagctttattgcgattgtcatagccatgttacgggcgattgtcatgtccattgccgagacattgtcgtaacagaccgtttcgttttccggaaacgctggttcgttaggtttttcttccatcaaggcacgatgcctcagattggcatgcgttcgcatggggtggaagggagcgtggaacgatgattgaatccgccgcacgaaggttggcttcggaactggtcgatcgtcgggagtcgatcaaccgggagctgagccgtaatggcgtacggttcggcatctacaagaacggcgagtaccatgaccggctgtttccgtacgatccgattccgcgcatcatcgaatcggacgaattcgacagaatggaagccggactgaaacagcgcgtcaacgcgttgaacgcctacctgcgcgacatctactccgacaagcaggccatcaaggacggcatcgtgccggaagaatacgtgtacacgtccgcgggatactttccgcaagtcaacggcgtgacacctccgggcggcgtgttcgcgcacatcgccggcgaggacctggtgcaggggcaggacgggcaatggtgggtgctggaagacaatctgcgcattccatccggtgccagctatccgctgttcgcccgcgatatcgaacgcagaatcacgcccagcctgttccgcaacgtacgtgtgcgcgacaatcgcgattatccacgactgctgcgccaatccatggatttcgtctccaccgacggtatagcagtggtgctcacccccggcaggtacaattccgcgttcttcgaacatgcatacctggccgagaaaaccggcgcggcgctcgcgttccccgaagacctcgaagtcgtggacaacaaagtgtacttcctcgactatgccggcaggaaacaccgcgtcggcgtggtctaccgccgtctgtccgacgaatatctcgacccgttcgcattcaacccggattccgtgatcggcgtgccgggaatcctatccgcctacaggtcgggcaatgtggcgatcgtcaacgctccgggcaacggcgcggccgacgacaaggccatctactatttcgtgccgaacatgatccgctattatctcggcgaagagccgattctgcacaatgcgccgacctacatgccgatgttcgacaaggaccgcaaggaggtactcgaccggctcggcgaactggtcatcaaggatgtggcggaagcgggcggctacggcgtcgtgttcggctcgtcgctcgaccggtggcggcgagaggaactggccgaacgcatcaaggccgaaccgcgccggttcatcgcgcaggaggtcatccaattcaaggacatcgacgtggtggaccccgaaaccggacagatgagcccacgtaaatgcgacctgcgcgccttcgtggtgaccggcaagaacacgcacgtatggtattcgggactgacacgctactcgtccataccgggccagatgatcgtcaactcatcacagggcggcggtttcaaggacacctgggtactggccaaagagaccggcgtggagcatgattacgcacccggctcggaggtcgtgcgcgtgctggagcagtcccgcaagcactcgctggcactcgtcaccgcgtcgaaggccgacaacctgttctggctcggccgctacacggaacgcgtattcaccacgctgagccaattcttccccttctacgaccgtgtgatggacacggatgtggacgcgttccgaccgttcgcccgcgcgctcgacctgccggaggatttcgaggatttcgacgcgttcatccacagcttcctgtacgacgagaagaatccggattccgtacgcagcgccatcgtctacgcgttcaacaacgcggtgattctgcgccccgaacttggttctcgttcgttgcagcaggtggagttggccatgagctccatagtggaggcatccgaatacggcggcacggacgcggacatcttcaaacaccgcgacatcgcggacaacatgctcgccttctggggaggtgtggagaattcccccgtcgaaccgactctgaaatcgttcattttcgtgggcaaatatctggaacgtctggatctgtacacacgattcggatattccgtggaagagctcaaggcgccgctcgccaaactgggtagctacatcctgccgttgaacggtctgccggtaccgcaatgcttcgccgaaggattgcgctggctggtcggccagctgccgcagcggggatatgcggagcttgcggaaaaactggggatgctgctgaaagatttcgatgggcgcatctccacgaaggatctgaaggatctgggcatgctcaacacgatggacatggacgccgcgcgactgtgaagaatacgttccgcagccatcgcacggtgcgtgtataacggctagaacaaggtccacggcgtggaaaacgccgaaggaacgacaataatcgctgaggagacgatgtgaagaaactggtgtttgactatgagatgaagctctcattcagctcgcccgtgaccgaccatcgcttccaactgcgctgcattccagccaccggcccacgccagcaggtgatcgacgtggcagtcaaaatcgaaccggatgtggaactcgaaaccaccatcgattccttcgattccgtggtgatgaccggattcattcccgaaccgcacaccatgttcaactactcggtgaccggcatcgccttcgtggacaacgcgcatatcaaatccgaaatctacaagccgctgtaccgcttcaattcggcgttgacagtgccggggccggccatcgaagcgttgatcggcatctgccgtgaacgcatcgcgtccctgcctgccgactgcacgccgatcgaccaagcccgtgaggtgatggacgaggtgttcaaaacgttcgtctacacgccggcctccaccaccatccgcaccaccgccgaggaagcgttcgctcaacgcaagggcgtatgccaggattacgcgcacgtcatgctgtccgtgtgccggcacgtcggactcactgcccgatacatcgcgggattgctcggcggcgagggcgccacgcacgcatgggtcgaaatctaccatgatggacgttgggtcggtttggaccccacacacaaccgtatggtcgacgacaactacatcaccatcgcccatggccgcgattaccgcgactgcatgctcgacatcggcatcttctccggctgcgacgtcaagcaggaccagtgggtcaacgcttccgtgcacgagcagggatactgattccccgacgttttctcgatgccggattccgtatttcggcagatgcaaagcagataaacaaaaaaggccgaaacgccattgtttcaaccttcattgcatgcggataaggcgagattcgaactcgcggaggggttcgccctcacacgctttcgaggcgtgctccttagaccgctcggacacttatccattcgtcacctgaaaacaagcaacttgataattgtgccacagtggtggcgattgtcaaatcggactggctgcaacggtgtgatttccggcgtgtcttgctttgcgcccgactgtgcgtccttaggcgaacagcgcttcgtcgaaggaaggatagccccaatcaagcgccaattcgacacggtccgcaatcagaccggcaagcacgcccagggattgcgctcgcgaatccgtcgactgttttgcattggtgacgcgtgactgggaatgatcgttcgcggcattggagcttccggcgattgccgttatctcgcttcgcgcgcagttcatttcgatggtggcgtcggtcggtgccgtaaggccggtggcggaatcgagcatcgtgtcggggtgggcgagcaaggcggtggcctcgtacgttttcctacgatcgtcaatggtgcccgagaaggatgcgaaccgttgcgatgtggtcttatgacgatcgctgatatccagcgtcgcatggccgctgttgcgggccgccagcacttccatggcgaatccggcacggtcttcggcctgcgcggcggtggcaagggacttggaatcgacgtcaagcgattcgacatcgtcaaaacgcgacagcgtgatcggcgcgacggccaccgacagttgatcgcccagtgcgcgagccatatgacgtgcctgcgcgctgcgcaacgtgccttcggcaaaacgcgccggacattgcgccgcggtgttcgtccatgcggagaccgcctgctgcgccgagaaatagcggcggatgatgtgctgatgctggtcgtgtgcgatcttgttatcggcggtggcatcgaaataggccttctcgcacgggctttgccgttgttcggcttcagtcctgcctgcgatcctgggcatggagcatgccgtcagcgccggcatgaggatagcggtgcaaagcaatgcgcagacgcgtttcgcgataaaagaaaccgagcggaaagaaggggtacgtgtctgcatgaatcattagactaatatctgactgtgaccattgggccatgcgctcggaataacttcatataggaggtcttggaaatatggaactggacctggcaggaatgcaccagctcgccgctgggcagggaattgatcccgagacgctggatgccgcactctcggaagcattgcgactggcatatctgaaaacccctcacgctgcgaagcacgctcgcgtcgagcttgatccgcgtgcgggaagcttcaccgtatgggcccaggacgagattcctggcgagccgactgaagacgatccccaccccgcgccgactctgggcgaggaatacgacgacactccgcacgatttcggccgactggccgctgcgaccgctcgtcaggtgatcagccagctgttccgcaaggccgaggatgacaaggtgttcggcgcgttctccggtcagaagggcaagctcatcaccggcatcgtgcagcaggacgtcaaggacacatccaacgtgcacgtggccgtcggcgacgtcgaagccctgctgccgcgccgcgagcaggtgcccggcgaacgctaccgtcacggcgaacgtatccgcgtgtacgtggtgaacgtggcccgtggtctgaagggcccggaaatcgtggtgtcccgttcccatccggagctggtccgccgcctgttcgaacgtgaggttccggaactggtttcgggagccgtgtcgattatggccatcgcccgcgaggcgggcgcccgcaccaagatcgccgtccgtgccaacaccgaaggcgtcaacccgaagggcgcgctgatcggccccggcggagcccgagtgcgcgccgtcatggagaacctcggtcctgagaaaatcgatatcgtcgactggtccgcggatccggcgaaattcgtcgccgcggcgctgtctccggccgtcgccaccggtgtgcaggtgatcagcgagaagaacaagacggccatcgccttcatccacgatgaccagctgtccctggccatcggcaaggaaggccagaacgcacgtcttgcggccaagctgaccggctggaagatcggcatcgaatccgctgaggcgcatgccaagaagatggccgaatcggcggaccattccgatggggaaaccgaggaataaacaacacttccggtagacaacaagcccgtggacgtacaatccacgggcttgagtatgctggactcgacaatccaaagcgtgacggccatgccgtcatgcccagggaaaagacgaggtatcacgaacatggttgcacgatgagaaggaacaagctcgccgtgaatcagtagcggtcgcgcccgtatgcgcgcggcccaagataggagaattgagtgccgaaagcacgcgtatatgaacttgccaaggaacttggcgttgacagcaaaaccgttttaagcaaacttgaggcgatgggcgaattcgtgaagtccgcatcgtctaccgttgaacctcccgttgcacgcaagctgaggaacgcattcgcgtccagcggacagggcaacgcatctgattccaagaagccgggccatacggccaagaagcctgtcgaaccggcatctcattccatgccaaagccggccgctccgtcagcaccgaagccggctgcccccgcagcgccgaagccgcatcatgccgcttccaagtccgatgccccgaagccgggccatcgcgcgccgcgtccaggcgaatcccgccagcatggcaatcgtcctaacggcaacgccccgcgtccgcagggtggagaccgccgccagtccggtcgcccgacggccgttccgggagctcgcccccagcatggcaacgctccgcagggcggcaacaacgccaatggcgcgaagccgcacaccccgggaccgcgcccgggcaacaatccgttcagccgcaagcagggcatgcacaccccgactccgggtgatattccgcgtccgcatccgatgaaccgtccgagcgtcaacaatggcgaaggacgtcgtggtggccgtccgggtcagggcggtggccagcgtggcggcttccgtggtcgtccgggtcagggcggcgcgaagccaggccagtggggccagcatcgtccgggtcagggcggtggccagcgtcccgccggcggcggcaatcgtttcggtggcaatggcggcggtttccagggcggcaacagcgctccgagcaatggtccggcacgtggtggccgcggccgcggcggcgctgcaggcgcgttcggacgtcagggaggcaagtcctcgaaggcgcgtaagaaccgtctggcgaagcgtcaggaattccaggagatgaaggctccggtcatcggcggcgtgcgcattccgaccggcaacggacaggaagtccgtctgcgtcagggtgcgtccctcgccgatctggccgagaagatcaacgtcaatccggcggcgctggtcaccgtgctgttccaccttggtgaaatggccacggccacccagtccctggatgaggccacgttccagatcctcggcgaggaaatcggctggaacatcaagatcgtgtccgccgaagaggaagacaaggagctgctgcagcagttcgacatcaacctggacgaagaggaactgcaggaggacgaggatttgaagccgcgtccgccggtcgtcaccgtcatgggccatgtcgaccacggtaagacccgactgctcgacaccatccgccgcaccaacgtcatcgaaggcgaagccggcggcatcacccagcgcatcggcgcataccaggtgaccgtcaaccttgagggcgagccgcgcaagatcacgttccttgataccccgggccacgaagccttcaccgcaatgcgtgcccgtggcgccgaactcaccgacgtcgcgatcctcgtggtcgccgccgacgacggcgtcatgccgcagaccgtggaagccatcaaccacgcccaggccgcgcatgtgccgatcgtggtggccgtcaacaagatcgataagccgggcgccaacccggacaaggtccgcggccagcttaccgaatacggtctggttccggaagaatacggcggcaacaccatgttcgtcgacatctccgcgaagcagggcaccaacgtcgacaagctgctcgaagcggtgctgctcactgccgacgccgagctcgacctgcgcgccaacccggatatggacgcccgtggcgccaccgtcgaagcccgacttgacaagggccgtggcgccgtggctaccgtgctggtgcagtccggtaccctccacatcggcgatgccatcgttgccggcacctcctacggtcgtgtccgcgccatgctcgacgaaaacggcaaccacatgcaggaagccggtccgtccaccccggtgcaggtgctgggtctgacctccgtgccgaccgcaggcgacctgttcctggtggcctccgacgaccgtaccgcacgtcagatcgccgagaagcgtcaggccaccgagcgtgcggcccagctggccaagcgccgcaaggtcgtttccctcgaaagcctcaaggagcagttcgccaagtccgaggtggatatgctcaacatcgtcatcaagggcgattcctccggttccgtcgaggctctggaagattccttgatgaagatcgaggtgtccgacgaggtcggcatccaggtgatccaccgcggcgtcggcgccatcacccagaacgacgtcaacctggccaccgtcgacaaggccgtcatcatcggcttcaacgtccgtccgaaccgccaggtggcggatctggccgaacgcgaaggtgtggagatcaagtactactcgatcatctacaaggccatcgaggacatcgaagcatccctcaagggcatgctcaagccggaatacgaagaggtcgtcacctcccactccgagatccgcgagatcttccgctcctccaagttcggcaacatcgccggcgtcatggttcaggacggcgaagtcaagcgtggtacgaagtgccgtatcctgcgcaacggcatcgccaccgtcaacgacctcgagatctcctcgctgcgtcgtttcaaggacgacgtcaactccgtcaaggaaggctacgaggctggcatcaacctcggcaccttcaacgacatcgagatcggcgatatcatcgagaccttcgaaatgcaggaaatcgagcgtaagtagctgagtgcttcgagcttcgtatcgataaccaggtaaggaacgcccacagccggttcacgactgcgggcgttccgtgatacaacaagaacttttcaccaaaaggacagcaatggcaggaaccaatccccgcgccgcgcgcatcgcggcgttgattcagcgtgtgatcgcatcgtccatggaggcgcagctgcacgacaagcgactggccaacgtgaccatcaccgaagtgcgcgtcaccaacgatctgcagatcgcgaaagtctactggacccagctcggccatgaaggacacgagcagggcgaacgccgccgcgcgcagcaggccctgaaccaggccaaaggacgcctgcgttccctggtaggcaccaaggccggactgcgactcaccccgcaactggaattcatcttcgacgaagtgccgggcgaggcccatgagatcgaggacatcctcgcgctcgcacacaagcgcgacgaagaactcgccaagtcccgcgccaacgcgcaatacgccggcgacgccgatccgtacaagcacgacgagcccgatgatgacgacttcgacgatgatgacgatgtcgaggtcgaggattgggacgatgacgacgaagcctgacaactccggtctgctggtcatcgacaagccgcagggcgtcaccagccacgatgtggtcgcggcggtgcgtggcgccctgcacatgaaacgcgtcggccatgccggcacgctcgacccgatggccaccggcgtgctggtggtcggcttcggcaacgccacacgtctgctcaactacatcgtcgaccacgacaaaacctatctggccaccatcagactcggccagcgcaccaccacggacgacgccgacggcgaactgctgccggaggagggaactatcgccgaatttccttcacgacagaccgttgaagacgtcatcgcccatcatttcaccgggcgcatcgagcaggtgccgaactcctattcggccatcaaaatcaacggccagcgcgcctacgatctggcccgcgaaggcaaggacgtggaactcaaagcccgtccggtcaacatctcggaattcagcgtttccgcggtgcgctacggctatgcctcatccgtgcgcgcgggttcgccgctcgtcaatgccgcagaagtcgctccggattcggcatggcatgccaacacgttagaaccggacatgcagccggtcatggaactcgatgtgaaagtgacctgttccgccggtacctacatccgcgcgctcggccgagatctgggcgacgagcttggtctcggcggccatctgaccatgctgcgccgcatccgcgtcgggcgtttctcggtggacatgccgaacgtcatgaccgcccatacggaagctaagaccttcaccaaccgcgaaggcatcgaagtgacacgcaaccgtgcggtgcttgacgatgccgagcatgccgttgaccacgcactcgacctggtcgccagcgcggccgcttccacggacatgcttcccgtcaccgaacaggaggcgacggacctgcggttcggccgtagaatcgcccacgacatccatacgaccatggccgcgtacgttcccgaaaccaacgatctggtggcgatcgtggaacgcgccaaacgtggcgagaccaagccggtcgcggtcttcaactgaaacaatcaagaccagccggcacgcaatacgaacacgacaaacacacggacaatacgcaaagaaggacacatgaagacgatcacgcttacccccgatgccagcggcatggtggattggccgaccctgagcaacgacaagaagtccgtggtgaccatcggctcattcgacggcatgcatcagggacatcaggcggtcatccgccgtgtggccgaactcgccgaacaggagcaggcgttctccgtggtggtgctgttcgacccgcgtcccgcgctggtgcacgcttacgccgccaaacatgacggtcaggaaccgcccgcaggcacgcctgacacgcaggcgctgaccagtgtggacgaacggctgcgcgccatcgacgccatcggcgtggactacacgctcatcgtgcgctacaccatggcattctccgcgaaatcataccgcttcttccttggccagatggtcggcaaactcggcatgcgcacgctggtgctcggctccgacgccgccatgggtgcgaaccgcgccggaaacgtgaaggccattgagaatctggcgctcgccaccggcgtgttccagctggaggtcgtggacgatttcggtccggggctgacccgagtgccggtcaatgcgaagccggtgatgccgtccgaacccggcgagccttccgaccctctggagggggcttccaaggccgaacgacgcgcatggagcaagaagcatcaggccaaggaagtgcgcacgtggagctccaccaatgtgcgctatctgctgagccaaggccgtatcaaggacgcagacgcgatactcggccacgcgcatgccgtggaaggcaccgtggtgcatggcgaggaacgcggccgcaccatcggattcccgaccgccaatctgagcgagaacgtcgccggatacctgccggtggacggcgtgtacgccggctggctggtcgatttgggggagaagtccgccgacggtggcgaagaagccggggagaagccggccgacggcgtatcgcagcagtatgatgcttcgtccgtcaacgcgcgcgtggccatgcagtcgccacaccgctggccggcggccatctccatcggcaccaagccgacgttcaacgaggacggtgacgccgaacgcgtggtggaagcctatgccatcaccgatgactggttggacctgtacggccatcaggcgcgcgtggaattcgctggattcctgcgcccgcagatcaaattcgattcggccgacgatctggcggccgagctgaaacgcaacgtcgaggagacgaagcgcctcaccgcttgagacggatcggttcgattgatttgattggttcgattgacgcgaatcattgacgccatccgtgttttgttacccaaacgggctttcccgggttgcaaaaagcggatggcgatgccgtttgggcatcggcgacctatcgcagaatcgcggccaacgcgtcctgcaacgtatccgcctgcaccacgcccattcccggcacggcgacgttcttgcgcagcgtcggcacaacggcggtggtgaaaccaagacgcgccgcctcacgaagccgatattccagtctcggcaccgggcgcacctgcccggtcaacgaaatctcgccgatcgcgcacgtcgtacggggaatcggtttcgatttcgcagcgctcgccaacgcggccacaatcgccagatcgcaacccggctcacgcgcctgaccgccggcgattgtggaaatgtacaggtcgttggccagcagattgatgccaccgtgacgatataacaccgccaccagcatggcgatacggttggagtccacaccgttcgccgcacgacgtggcgtcggcagcaccgacctggtgaccagcgcctgcacttcaatcggcagactgcgatgcccatccaacgtgaacgtcacgcacgtgccatccacctgcgtcgccgcagaaccattgccggttgataggaacagaccggacggatcggtcacctcctcaatgccctcgccgctcatatcgaaacagccgacctcatcggtcggtccgaaacggttcttcactgcacgcagcatacgcaacgcggtttcggcatcgccttcgaactgacagaccacatccaccagatgctccaacgtacgcggacctgcgatcgaaccatccttggtgacatgacccaccaaaagcactggaatatcaagggttttggcggtgtcaatcagcgcgctcgccacttcgcgcacctgcgtggatccgccggagatgccatcgacgtcctgcgagacgatggtctgcgccgaatcgacgatggccaacgccggcttgaactgttcgataagccccaacaccgtggacagatccgtggtggaggcgagcagtagattcggctccatggcgccgatgcgcgacgcgcgcatgcggacctgcgcctgcgattcctcgccggaaatatacagtacggtattgcgctcggtggcgaacgccgtcagcctcgccacattgccggcggtttccagcagcaatgtcgatttgccgatgcccggctctcctgcgatcagcgtgaccgatcccggcacgatgccaccgccgagcacgcggtcgaattccgaaaatcctgtggcgattctggagatgttctccgtgcctatgtcggtgatcggcctcgccgcggacgatgcgaccggatgcgattgcgtgcgcgaggtccgtcccggagccgcggtacgcgagcctgccgcgggacgggcttcatggaattcctcaatggtgccccattgaccgcattcggggcagcggccgagccacttcgggccgctccagccgcattcggaacagaggaattgcgaggacgtctttgccatatcgccgacaatacggaggttttgggacaagacgttcgcgggtggcgtactcgttgcacagacattgcgctgaaaaccgtttcgggaactggattccatgactttgaggggatggttgcgcgtcttatggctgtgaaagaatgacaagcatgtctgatacgcagaattcctcttcgcatggcaaattgattgccgccgtcgtagcagccgcgcttgtggttgtgcttgctctgatttccgcatttgtgtggcctggttgggccttgaacaagaacggacaagccggtcaggccggtcagacgagccagcaggcttccacttcgaacggtacggacggcgacaagacggagcccaccaaaccgtcgatcgatgccgtggcattgcccgacggggccagcgagctgctcaaggccatgccggattccgtattgaattacgcgcgtaccaaggctgacgccagcacgacgtggtccagcacctctcccgtcgaggaatacgcgttgacgtattccaccggcaagaaaggacaggacgtcacgctggaagtgggccagtggaacgacggcgacaaggcgaaatcccagtacgacacgctggctgaagccatgaccggcaaggagctgggaagcggcaacgtgaaggtctccggcaagacgaccggcgcctacagcgccaaagccgatccggacgacgataccaaggccgttgccgtgtggcgcaacgatacggtggttttctatgccaccggcgcgaagaacgacatccagcgtttctaccagcagttccccctgtaacgtcgacggaatcgtctcgatggcgaatcgcggccggctgatggaatatcacgcggaaaacgaaacgtgattttccaccatatgaatgcctgcgcgcgtattcgtccccgaagcagtgtagtattgggcaagttgcaaacttttaccctttgagtttaaggaacggaggctgagatgggctcggtcatcaagaagcgccgcaagcgcatgagcaagaagaagcatcgtaaactgcttcgtaagactcgccaccagcgcaagtagtcttcaggcgcgtgtgaagcgtccgctcaaacaaaatcccgcgattcctttcggagtcgcgggatttttgctatctgcgcggcggtgtcggccggtatattccacaccagccgacacgcctgcctgtcaagatctcacttgttggggttgtccatcacgcgcgggccgttcggatcgccgacgatgacctggtccaccatgttcaggaacaggccgtgctcgaccacgccgaccgtggtgatgaggtcctgcgcgagctcctgcgggtggtcgatgcgctcgaggtgcagatccaccacatagttgttctcatcggtgcgcaccggctcgccgttcgcgtcgagacgcagcaccggcttgtagcccttggcctcaaacttcttgacgacctggcctgcgccgaacggaatcacctcgaccggcagcgggaacttgccgatggtgtccacgaccttggactcgtccacgatccacacgatcttgttggagttggtggccacgatcttctcccacaggagagccgcaccgccgcccttgatgccgttgaagttcttgtccacctcgtcggcgccgtcgatggtcacgtcgatatggtcgacgtcatcgatgttgacgatcttgatgccgtagccttcggcctgctcctgggtgcggcgggaggtggtgacgcccgtgaactcgaggccttcctccttgacgcgacgaccgagctcgtcgaccaggaaacgcacggtcgagccggtgcccagacctgcgatcatgccgttctgaatcagctttgcagcctcgatgccggccgccttcttcagcgcgtcctgctgtgccttgtccatgatcctccttcgatatggggttaagaccgtctccatactatcggatgcgttgattttcaaggcgcgaatggtcggttgcgggagcaggtgtctgttttggactgcggaaaagttttcacggaatgtttcacggtcctgcgtgaggtggcgtgcaaaaaaagacgcgcatgaaatgacatgtggggagcggcttgcgtaaagcggctccccacatgtctcgctcagctatgtttgaccgcgaacggcgcctcgtccaataccagcgtgccgtcacccatcacatagccttccacggcgatatacccacggatgagacgtggattgccgtcgaaggtcgggctggattccggtgggggagtgaaccgcaccgtacccgacaccgacaggcccgatgggcttggacgatgcggcagtttcggcagatcctgcgattgcgatgaagctgcctgttccggtgccgattcttcgtcgtcttgcgattcgctgtgcgattcgttcgcattctgcggtacggccgtgctgtccgtgtccgtgccgtccgcgttgcccgtcaccggcttgtcgttctcgtcgccttcacggggaaaatagtcgggtttgaccagcatctgcgcataggattgatgcggttcaccggattcgtccgttttcccggattcgtccggttctccggattcgtccggttcggctggaccgcccgcgtccgggaagctggattcgggtatgaccttcgtcgcttcggtctcaagcattgtggtggtttccgccggttcggtctcgagcacggtcgtttccaccgcatcatctgcgtcgtcatcggttgtctgtccgaaatccgcaaggtcgtgggaaacgccttccggctccgccagcatgctggcgatcgaacgcggcttcgtgctgttgctggaattggcggtatcggcaccggaatcgccggtgccggtcgtggcggaatcgccttgtccgcgtcccatgtggtattcggcggcgctgatcgcaccatccatcagtatcctcgcatcctcgggaacatcggtgccacgcgaatactcggaagccagtagcgactgccatccttccaacggcagatagccttcgcgcacatgcgaacggcaatcgcccgcatacgtgcgtgccagctcgtccactttctcgttgcccgcgttgccggcatgacccttgacccacacgaatcgcaccgaccccgccctatgtgcgatctcattgtcgatggcgcggatcaaatcggcgttcttcaccggtttcttctgcgaattcttccagccgttgcgcttccaaccctgcacccacttggtggagcagttgatcgcatactgcgagtcggtctcgatcaccaggtcttcggaaccgggatgcgctcgcaacgcctccagcacggcgcataattcgccgatctggttggtgccgttcgtcgcgccgccggcatcgcaatcgccggcatgctcgtgccccggcttgccgcctgccgcgggctcgtggtcggcccaggcccaacccatcggaccattcggattgccaagcgcggaaccgtctgttgaaaccgtaatcgtcatgcttctaccctacgaaagccgcgcgactcgccgcttgcccgtcataccgcatggcaacggcatatgcgattagtcgccgagacacagcatgacggaggcgcggaacatgccgtcgctgtgctcgaaggaggccgtgccatggtgccgttcggccgtctctcgtacggtggcggtgcccagccccgtgccaccatgtttggtcgagacgagatcgccgtcgatctgttcgatgctggtatcggcttcgccgtacgtgttgtccaccgtgataaacagggccgccggagggccggaacgataccggatgcgcactttgagccgcctctcgccctgcgtttgctgggtgatggcctccgtggcgttctccagcagattgccgaccatggagcataattccgcgttgttgatgttgatgtattgcggcaccgccgctttgacgtccacatccgcacccaaatgccggacccaatcgcaatagtagacaagcaccgcgttcagcgacgcatgctcgcaatactgcattggtgccgtttgcagcagccggtgtttggacatctcatccagatatgagcggatgccatccatgtcttcagccgcggccaacgcctgcagtgagtggatgtggtgacgcacgttgtgcttgatctgacgcgcctcacggatccgctcgttcatgtgttgcagctgcaacgtctgcaaagcctcataatgctgtcgcctgcgggccgcgagcagacggtccgactgctgaatcatgtaccagatgaggaaatacaccaacaccatgaaacaggaatagaccaccgccacggtgaacgcgatttccagcatatgcgagtccagcagcgtggaattgtccgccggcatgcaccacaccacaatcgcggacgaaacgaacggaaacagccagataagctgccagaagcctttgctgatggatggggaatcgaatgtggctggaatcgaatcatgcagcggatgccaaagcgagaccagtacgacgacgtcaagcagcagcagattgaccagtcccggccagccgacgcggagattggttgaatccgcgccaagaacggccacatcgatgacgagcgacagatagtagacgatcgccaccatgtaggaagccgtggccacaatcagcaacagttgccgccatggcagttcggtcagccatcgcaggaccagcagcacaagcggcgcggtcggaatgaccgtccacagtgatgggatgcccagagtgccgcacagcacgccgcatagcaggaaccagaccagtccgatggacatgaacagtgtgccgttacggcgtggattgtccatgtgactccatgccatgatgaggcacaatgccaggccggacaacgcgttgagctgctctccgatggcgaagaacagacctgacggggtggtttgggcgatgccgttccggatgatttcgccgagtggtgcgaacatgtcagtcctccgtacgcatgcgggtgaacgtgtattccgcgtatgcgcggcaggtggtggtcaccgccgttttcgtgataggaatgcgtttgccgcctttcatgacgaactgcgcgttggtgatgccggacacgtagtcgaagttgacgagcacgcctcgcgcggtgcggtagaagttgtcgaacacggtgagccgttggtccacgtcggagaaattggtgcggattttggtctgggtgccgtccgcgaacgtaaattccacgtagtgcgcgttggacagggcgtatgcgatgagccgccggtccatggtcacggccggattgccgaacgccacatgccagctggaatccaccgtgccgggcgactgcgcctttgccagatgggtgaccggcggttttgccttcagctgctcttcgacgcgttccatggtggcttcgaaggttttgcgattgacgggcttgagcagataaccgctcgcctgcacctcgtagccgagcaccgcgaaatcggtgctggacgtgatgaagacgatcgcgcagtcgtcgttctgattgcgcagcagccgcgctatgtccaatccggtggtggcatgcggcagattctcgtcgctgagataacagtcgagcagcagcaggtcgtaacggctgttcttccagctttcgatgaacgatttcgcgtcggggaaaacgtcacagaccgtttgcatggcattcctgccggcggttgcgccgacgttccggccgttgaagtattccgcgcacatggtggcgatcagttcgcgttcggcagggtgatcctcgacgatggcgatgcgcacgttccctccttgctgtgccgtgattgcgcggatgacgttccggctctgcttccaagcgtaccgggagagggaaatacggggtgccgcggagcttgcgtttcatgccagaaaagcacgtttcgtgccatacggcggatatcgacaacgaaaaagacccgctccatacggaacgggtctttttcgcgctacgccttgattacttggcggaacgccgtatcactcggccagagccttgtccacgacctcggtggcctcggcgagcaccttgtccagagcctcaggggattcgaagctctcggcgtacaccttgtagatgttctcggtgccggacggacgggcggcgaaccagttgtccttggtggtgaccttcagaccgccgatcttggcgtggttgcccggagcctcggtgagcttggcggtgatgtcctcgccggccagctgggtggcctcgacgtcgtcgccggtgagcttggcgaacttctgcttctgctcgagggtggtcggggtatcgacgcgcttgtaccagctttcgccgaaacgctccacctgctcctggtgcagctgggccgggttcttgccggtcttcgcggtgatctcagcggccagcaggtccggaatcaggccgtccttgtcggtggtccacacgcggccgtccttacgcaggaaggacatgccggagctttcctcgccgccgaacgcgacctcgcccttgaacagcgggtccacgaaccacttgaagccgaccggaacctcgacgagcttggcgttgatggaggcggccacgcggtcgatcagggaggaagacacgagggtcttgccgatgccggcgttctccggccaatccggacggttgccgccgaacaggtattccacgcacactgcgatgtagtggttcgggttcatgacgccccagttcgggcagacgatgccatggcggtcggcatccggatcggtgccgccgaccagatcgtacttgtcccaagcgccgttgttgagggaatcgaccagacccttcatcgcgtacggggagctcggatccatgcggatcttgccatcatggtcgatggtcatgaagctccaggtcgggtcgacctgcggacgcaccacgtcgatggtcaggttgtacttctcgttcatgagcggccagtagttgaccgaagcgccgccgagcgggtcgatgcccaggcgtacgccggaggagcggatcacgtcgaagtcgatgacgttctccagatcggccacatagtgctcacggaagtcgaaacgctcaaccagatcggacttgacggcctgctcgaacggcacgcgcttgacgttcctgaaatcgccgagcagctcgttggcgcggtcggcgatggcgttggtgacgtccgccggagccgggccgccggtgaccggatcgtacttgaagccgccatcggtcggcgggttgtgggacggggtcacgacgatgccgtcggccaggccttcgccggtgaagcgctgggtgccgtcggcggcgcggttgtgggtcaggatggcctgggacacgaccggggtcggggtgaagtcgtcacgggagtcgatgcgcacggtcacgccgttggcgacgagcacttcgatggcggtcttccaagccggctcggacagggcgtgggtgtcgcggccgatgtacagcgggccggtgacgccggccttcttgcggtattcggcgatggcctgcgtgatggccacgatgtgggcctcgttgaacgaggtcttcagggacgaaccacggtgtccggaagtgccgaaggagacgcgctgctccggaacgttcgggtcggggacgacgtcatagtactttccaatgacctcgtcgacattgatcagatctgctggggtggcgggcattcccgcattttttgcaaccataccttcattgtgccacgagtttgcgcggaacgcggaaagtcatcccacaatgtgcgatgaatacgttttctttttgacgtctcggcgtgtctccagtatggaattggggtttcagtgtcccgatacccgacgatttgcgcatcgcatgccgatagtgtattgtttctaacgaattcgactcatgcagggttgcaagtcaacatttttagacgcaagacctggaatgtggcattggtttgccatgttccgggtcttttttgttgcaaaaaagccgcgctgcgtcatcgaatcccatcggaaggaaatagaaaggaatcaggatggctgactctctcgcatcgcagatcatcactgcgatcggcggacctgaaaacgttcgcagtctgacgcattgcgccacccgactgcgcttcgagctggcggacgcgtccaaggtggaccagaacgccctcgaacatatgaagggcgtgcttggcgcggtcccgcaaagcggtgaccgtttccaggtcgtcatcggcggcggtgtggccaccgtatacgaaaacatcatgcatctgcccgaaatggcgaacgccggtgccgcctccgtatccggcgaaggccagaagagcaacgccgacgtcaaggccgaggcccgttccaaggcacgcggcaaggtggcatggctggactccttcttcgagtatctcgccgactccttccgcccgatcctgggcgtgctgctcggcgcctccatcatcatcgccctggtcaacctgctcatctcactgaacgtcattccgaatgacgaggcctccgccggctgggtgttcgtcaaggccatctggaagggcgtgttctacttcctgccgatcatggtcgcctacaacgccgccaagaagctcaaggtcgatccgtggctgggcggcgccatcatggccatcctcatgaccccgcagttcaccagcctgatagacgccaagaccaccacgtgcgtggagaacgcggctctgggcaccaagtcctgcaccgccaacatcttcggcattccgatggcgttgagcgactacagcggcaacgtgttcgtgccgctgctcatggccgccgtgctcgccctcgtctaccacggattgaagaagatcattcccgaaagcgtccagctggtgttcgtgccgttcttctgcatgatcatcgtcggcgcgctgaccgccttcatcatcggcccgatcggcgtgtgggtcggcaacggcctcggcgtcggcttggcttggatgaacacccatgcaccgttcatcttcgccatcatcatcccgctgctgtacccgttcctcgtgccgctcggcctgcactggccgctcaacgccctgatgctcatgaacatccagacgctgggctacgacttcatccagggcccgatgggcgtgtggaacttcgcttgcttcggcgccaccgccggcgtgctcttcatcgccgtgcgtgacaaggacaaggacatgcgccagaccgctctcggcgcgctcgcagccggcctgcttggtggtgtttccgaaccgtccctgtacggcatccacctgcgttacaagctggtctacaagcgcatgctcgtgggctgcggccttggtggcgtcgtcattgccgtcctcggctggctcttcccgtccgtcaccgccgtcggccagaccgtgcatggtgtgaccaccaccgccttcgccttcacctcgctgctgaccattccggtcttcgaccagatgtgggtgtacgcggtgtccatcgcggtctccttcctgacctccttcttcctgatcatcaccttcgactaccgcaccccggaacagaaggctgaagtgctggcccgcgccgccgccgatcagaaggccgccgctccggcggtcgaagccaaggaagccgctccggctgccaccaccgccaccgcgactgctaccgccaccaagaccgaagctccggccgctgccgccgccgcgaccaccgtggtgaacgctccggtcgccggccacgtgatcgccctggacgaaaccggcgatccggtgttcgcctcccgcgcgctcggcgaaggcgtcggcatccagccgaccgacagcgaggtcgtggccccggtctccggcgtgctgcagaccgtcgccgaaaccggccacgccttcggcatcaaaaccgatgacggtgtggaagtgctcgtgcacgtcggcatcgacaccgtgaagatgaacggcgagggctttgccgtcaaggtcaaggccgatgagcgcgtgaatgccggcgatccgctggtttccgtcgactttgctaaagtgaaggacgctggatacagcaccaccacgctgatgacggtgctcaacaccgccgccctcacctccgtcacgccgaagaccggcatcgacgtcaaggcaggggatgaggtgatcgacatccagcgctaacctgtcacacagaggcgaaaaaggggtcgacgtggacgttcttcgcgtattcaacaacaatgtcgtattggctagagacggtgatcgtgaggtgattctcacaggccgtggaataggcttccaagccaagccgggacaacatgtggatgacgcgaagatcgtccgtcggttcatccccgtcgatggcaaggatcccgaccacatggcgcaacaagtggccgggatcccgcccgaaatcatcagactcgtcacggacgccatgaaccgtacgggactgaaagaacaggcagacaagcagccaaccctggtcatggcgctcgccgaccacatctgcggcgcgatacaacgcgcgcaaagaaaacagaacatcgaatatccgctcgaagcggaagtacgttccctatacgccgacgaatacgccaaaggcgtggcgatggtcgacgcgatgaacacgtatttgggtggcgcgttgccccgcagtgaggcggtggcgctcgccttgcatttggtgaatgccggattctccggcggcgacctgtccgccacctacaccatgaccggcatcatccagcagatgatcgccgtcatcgaaggcgcgtacggcatcacgcttgcgcaggacagcgtcaatgtggcgcgattcatcacgcatctgcgttacctgttcgtacgcatccaccagcatgagcagctcgacgatgagccgcaaccaatcatcgaatcaatcaaaacctcatatccgaaggcttgccagtgcgcaaggcagcttgccgtggtggtgaagatgcgtcttggttccgaccttacggaagccgaaatcgcctatcttgccctgcatgtggcgcgcgtgaccaacggagtgaatcggcaggacgactgagtttccggtatcttccgatattcagcagcccgttccgcgcattcctgacggttcctaatcgttcgactgttcggccggctgcccgcttgcctgttcggtcggctgcggtttcgttggcgtagccgacatattcgcgttcaacgccagtatgccggtatcttcggaagcggcctccggcacgcgcacgcatagggcctgacgttccacactgaaacggatgtgcttcgtttcaggcagcatatcgccatccacctgcgccaaaacaggcctctccaaagtgatttccgcgctgacgccctgcacctggtcgacggtggagttcgtggacagcggactctgctgagctttgccggtgatggtctggtgcagcacgtcgccgaacagattcgcccaaccgatcaggccgccggacgtgtcgatgatctcgtagtcgaggatgccatcgtcataggaagcttcgggcatcagcgaaaacatggggatctggccgcaattgcccgccatgaacgtgcggaacgtgagaccacgcgtggaatgcgtgctgccgtcggcgctggtgatggtcacattgcccttgtacttcggggcgaacagattcttcacgcccgacacgaaatacgccagccagctgatgttcttcttcaattccggatcggtgtcgtcgatcatcagtgcgtcgaaaccgatgccggcgatgatgaggaacgcatgcccgtggtcggtggtctcatcatccagaagggtcagacggcccacatccaccagatgggagccgtgcgacgtggccacggtgagcgccgcatcgatatcgtccacgggaatgcccatattgcgggcgaacagattgccggtgccgatcggcacgatgcccagcgcatgcccggtacccgacagcgcgctcgcgacggtacgcaccgtgccatcgccgccgacagccaccaccacatcggcaccatggtccaacgcttcgaacgcgcaggcgcgaccgtccttgtcgagctgcgtttcgatgaattcgatctgggtgagatgcttcgcctcgcagaactccttgatatgctgcttgcgctgttccgcctggggctttgaaggattgactatgaacgcgtaatgcacttggtcatcgtcacgcttgtcaagcttctccgcgagcgtacggtgcttgtacgcgcggtatccgaagaaggcggccgcgcatacggcgaccacggcgatgatgacgagcaggacgataactggcataggcatgcctctattgtctatgcgattgcgcaaaaagacgaattcgacatgaaaaattcggcgttccctcacgttatatccaaaaatgagaacgatggcgtcagtgtctgctttcggcactaggctgggaagcatgcttgatattcaattcattcgtgaacatgctgacgttgtcaaggaatcccagcgtaagcgtggcgaatcggtcgaactggtcgacgaggtgctgcgctccgacgaggttcgccgttcctctctgaaggaattcgaagctgcccgcgcgcagcagaaggagatcggcaagaaggtcgccgccgcccccgccgacgaaaaggccaagctgatcgccgcaaccaaggaactctcccagaaggtctccgaatacaaggccgcagccgacgccgcagccgaggaatacaccaccgccatgtggaagctgtccaacatcgtcgagccggaagctccggaaggtggcgaggacgactacgtcgtggtcaagaaggtcggccagatccgtgatttcgcagccgaaggcttcgagccgaaggaccacctgacgctcggccgcggcgtggccggtatcgatatggagcgcggcgtgaaggtcggcggctcccgcttctacttcctgcgcggccaggtggcccgcatgcagatcgccatgctcaccatggccgtcgaccaggccgaggaacacggcttcaccctggccatcaccccgacgctggtgcgtccggaagtaatgcgcggcaccggcttcctcaactcccacgccgacgaaatctaccgcctgcgcgagccggacgaccagtatttggtcggcacctccgaagtggcgctcgccggcatgcacgagaacgagatcctgaaccttgagaacggcccgctgcgctactgcggctggagctcctgctaccgccgtgaagccggcgcagcaggcaaggacacctccggcatcatccgcgtgcaccagttcgacaaggtggagatgttcgtctacgccaagcaggaggactcctacaaggagcatgagcacctgttggccatggagcaggaaatgctcggcaaggtcgaggtgccgtaccgcatcatcgataccgccgccggcgatctgggctcctccgcggcacgtaagttcgactgcgaggcttgggtgccgacccagggccgttaccgtgagctgacctccacctccaactgcaccgagtatcaggcccgtcgtctgaacatccgcgaacgtatggaggatggcaacacccgcgccgtctccacgctgaacggcacgctggccaccacccgttggctggtcgccattctcgagaaccaccagcagaaggacggctccatcgaaattccgaaggccatgcgtccgtacatgggcggcaaggaagtcatcgagccgaccaagtgggaagcctgattttccaagacgttcgcgtctgatatgaatccgtgaaagcggcgttggcatttgtgccggcgccgcttttcgtatgttggacggtcccagtgccgtttgtgtcgttctgggcagatgcgtgtgcggttttctgttggaagcgacggggatggaggctgtgccaggtgtcgcacttccgcgcactgtggtatattggcgtttcgtgcgtagcagcgatgttaggcgcaaagggtagatgtctgagcggtctaaagagacggtcttgaaaaccgttgaggtgcaagcctccgcgagttcgaatctcgctctgcccgcatcaatcaagggcttaccgaaggatttttcggtaagcccttttccatgccgtttatggcgattgtcgttgtcgtggcggcaacgtcacacaatccgtcgatccgcggcccaacgggtgagctcggaacggttcgacagctgcagtttgcgcagcaccgagctcatatgggtctccacggtcttgatggagatgaacagttccgaagccacctccttgtacgtgtagccgcgcgcgatcagccgcatgacctcctgctcgcgattggacagccggtccagctcgtcatcgtggatcgggccgccgaacgcgccgttcgcgctcgggccgttctggaaggcggacagcacgaatcccgccaatttcggcgagaacacggcgtagccctcatgcacctgcttgatggaggacaccaggtcgtcgccggaaatagtcttcgtcacatatccctgcgcaccggcgcggatcacggaaccgacatcctgcggagaatccgacacggacagcgcgaggaagacggtatcgggggagtatgcgcgcgatttcgtgaggatttcggtgccgccgccgccctcgccgcccggcacatgcacatccagcagcaccacgtccggtttggtctgcgcgatcatcgccaccgatccttccacatccgcggcctgtccgaccacgtcgaaatgcggctgcaacgtggcgatcacgcccgcacggaacatctcatggtcgtccacgacggcgattctgatgcgctgttcccgctcgctcattcctgctccttggttcgattgattcattgccgcacctgctgcatgtgccgtgttcattgcgccgattgcacgcccgtatcgccgtccgctgtggtggtcgtagcgctgtccgcatcctccgccgctcctgaaatcggcatgtgcatgcgcacctccgtgccccagccgggcctcgacacaatctccactgtaccgccgcggcgcttgatacgtccgatgatggactcgcggatgcccaagcgattcgctggaatggcgtcgacgtcgaagccgtcgccatggtcgcgtacgaacacctccaccagcttgtcgccggcttcgcagtagacggacaccggttcgccgccatgcgtcacggcgttgacgagcgcctgctgcgtggcatccaacaacgcgtcggtctgcgcgctcggccgcgcgtcgcccaccgtcaccacctcgatcggcttgccgtgcgtgtcctccacatgcgctgcgatctgcttcaaaccggcgttgacggaacggtccgacgtggtgcgctcctgatatagccattcgcgcaactcgcgttcctgctgcctcgccagtgaaaacacggtctgctggtcgccggcatgcaactggatcagcgccagcgtctgcagcacgccgtcgtgcaggtgggcggtcatatcggcgcgctcctcctcgcgttccttcagcgcgcgttccgtgcccaaatcacgcaccagcgtcataatccacggcacaatcgccagcaacacgccgacaagcagcgccaaaccggcgacgagcatggtgaacgtggcgtgccgtgcggactgcataatgcgcacgtgggtggcgatgtagatcgcgtacgcgacgaaaatgaccgcgatgccgccgagcatcgtccataattggccgtccttcgcgttgaaccgcagccaggagacgccgacgccgaccacgccgagcagcaacggcacaatcagcgtgccttcaatgcctttcgccgccatcgccacgcataggcccagcataagcagtcccgccatggccagcagcgcgggtctcggcgcgttggcgaacatctgttccaggctttcggacgattgtgctccgctgccggattgcatgccgtccgcgttgccgtcgctgtcttgcgattgcgcgccgccgtttccgacgttccttaggtttcttacgttcctcacgttgccgtgggacagcggcgcgttctcgacgggctggctgccggcgatgacgtacgcctgctggaccgggtctccgacgggtacggtgatccacagaaaaatataggcgatcgcgcccgcaccgaagaaaaacgtggtgaccacgaaaatgaaacggatgagatgaacggacacgcccagatgcatgctgacggccttggccacgccagcgacctcgcggccgtacgtcgggcgcagcaacggcagtcgcgccggcttggacggcacgggacggccttcgcgcagggcctgcacgtagcaccagcgcatgtagaccgcgctggcttggtcgtactgttcctgcgtgtatcgcggtttggctaaggacttcatgcttccattgtgccctgtcggggatgccgattcagggctttcagctggtgttcagggcagattcagggtgttccccgatacgtatgacggctgcggattgctgtaatggagatatgagcaacgcaaacaacaatccgcaaggcggcagtgccgctggttctgccgaaccgcaatcgcagccacggccgccgatgtatcagccgcagccgaatcgcggcaatcgattcttcgcatggatccgctccagccggatcacgcgcggccgcaaccggtggatcgcaggcgtgtgcgacggcgtggcgcgccgcttgggatggaacgccaccctggtccgcgcgctggtgattcttacctcgctactgttcggcgccggagcggcgttctacgcattggcctggttcctgctaccggacgagacggatggccggatcctgtgcgaggagctggtcaacggccattgggattggaactgcgcgggcgcgctggtatgcgccgcggtggcgctgtgcctgcccggcgccggatggctggcgttcggcgtggccgtgttggtgttctggctgctggtgaaccgccagtcgtatgcggcgagctggcagacgccgcagcagggcggatcgtggcctgggcagcctgctcagcccgttcagccgggacagccggtgcggcctgcgcaatcgctatatatgccgcagccgatgtccacgaacacggccaccactgcaaacatgcccggcacgccaggccagccgatgccgcggccgacgtgtcccgcgccttccggctaccagcagtacgcgcgtcccgtccaatcgccataccagacgtttcagcagccggtgaacccgcctgcagcgtttgccgcggccaatgtgccgccgaccttcaccgctccgccgacggtggcggcgccgcagtcgaaacgcgcccgccgcaagccggccggaccgctgctggtactggtgacgcttggcttggcgttgctggcgatcgccggatctggctggtacgccattacgatgccggttgattgggattacgccttgcgcgtgctgcgtctcgccacactgtgctgcggcggcatctgcctgggaatcggcgtggtgatcgtcgtgcttggttgcatgggccgtcgcaccggcggcctgcatccgctggcatggtgcgcggcgttcatggccgtggtgatgacgttctgcacgagtgcggtggcatgggaaagccgcgattggatgatgtcgaatgactaccaccgcacgacggtctccggcatcgtgacatggagcgacaccagcgacgcccagatgaaacgatacgaacagggactggtggtggtcggcaagaactacgccaacgatgtgctcgacatcgatttgagcggatatccggcagcgcatggcaagcacaaggtcaagctcaacgacggcacgtacggcgaaagctcatgtccgacagggaagctgaatctggtggtggtgaacgcccaggtggtggtcacgctgccggacggatgccagtggtcggtcagcgatccggacgacggctacaccaacgtcacggattacataggagggccggacgggattacgttcttcaacggcacgggcttcatgggcctgtccctcgacgagaacgatgattcgggactcggccatcatggcgtgaacaagggcgttccggcgctcaacggcaccaccgatttcgacgattccggcgatgatgatgcgggcgatgccggttcggatacggagaacgattcgcaggattcggtatacgccggcacggatctcgacaaggcattcaaaacgatttacgagaacaagtggtattggccgtcgatcgattcggacaaggctccggaggaaccggatctgtatgtcaacgtcgatggaacggtcggcggcagtgtcaccatgcagtacacgtccgacagcaagctgccagtgggaacgacgggcggccaatcgcatggcagcgtcgatggaaagaacgtcgggaaaagcgccagcggaaaggaaacgaaatgagtgacgagaaaacccgtgaagtgccgttgaccgacgtcatgggaatcgcggaggtctcggacgagcccacggaaaccctgccggccgtcgacgatccgggcgaggcgaagaccgaatcgttccagaagccgttcgacggcggtccggaagcgcagaggaagttcgaatcgcaggacgaggccgaatcgctggaaacctccgggcaagacatgcgcggaagctttgcgggccgttcggcacgtccgaccggttccgtcaaatcggctgatccagccaaatcagccgagccggtcgacccctccaagcaagtgcgcatcggcaaaacggacggcgagctggtaatccgcccgtccggaccaagcaccggaaccatcgtgctgggcgtgttcttctgcctgatcggcctgatgtccatgctgtgcctgctgcccatcggcgcatggcggtggatgccgaatccctcgacgctgttcttctacgtggtcggcggtcttggcgcgctgctgctcatcatttccgtggtctgggccgtcgtcgccgcggtgcgtctgcgccgacgggaacgccagtcagcagaacagtccccagaaagccagcagcgccaacgatagcgccgccgacaccaccacacacgtggccacgatgacatggccggatccgatgcatgcttttccatcttttcctatatcgcatcggcttccggctgcggcatcgtggccattattcatatccgcatagtcatctatgcttgcaatcgcgcgattcctagcatgacgacggcacgcgtccacgatgatttccgccaacagccaggcgaacgcgacaaggctcagccatgtgagcatgacgatggcatgccagttcttggcaagcaccgccgaattgtcggtcaacgagatcgcatcaatgatgacggtgaccagatacgccaggaacacgccggtcgtgccgacggcaaggagggtgttgagcgccagtgcgacgcgcatgccgaccgggaatcgatggtcggttattgcgattggacgtgccgcattcggttgtgtggacggacctgtcggtgtggtcgcatccgttgaaaacattgaagtcgaatccgttggctctgccggttccgtcgaagccgaatcgtgcgatacccgccgtgacgcacggcgctcgcgcacccagccggcgatgagcagaattggcgcgccgcacatcgccagcagcgcgcagagcaggcaaaccgcgattgcgccgacaatcacacccatcgacttcaccagcgcgggcggggtcttcagcggtgccgcgaccgtctgattcggctgcgttccggcgatcatcggcgttgcccagccgttcgcacccgtgccgctcgtcaccgcgttgatccaatcctccagatcgtgcgtgtaatgcggttccaacggcagtcccggaaccgtctgattcgaaccggttcgaagttgatggttcgcgtcataataccgcagcgtcacattcgtattgccagcctggtttgcggctttgatcagcagccgcgcgccctgttcgaccggcatggctgtgtccttgacgccatagttgatgagtagcggcatggtgagcgatctgcggtatttggccgcgtcgaaatccgcataggcgagtcccatgcgttgtgtgccaaggctggtgatgcgcggaataagctgcttgacggcatcgggtgcgcccgcggcggtcagataattggtggctgcgagcgtcatctgctgacggcccgaaacgaccgggggagaggtgaggatggcgaaggcaagatccggatgctgttgcgtcagcacggtggcgatccatgtgccttccgattcggcgtagatgccggtttccgatctgctcacgcccggccattttctcaggatttccagcgatttcgcatagtcgtgcgcgctggacacgtagtcgcggtgcagcatggtgtagttgtcgagccgcttgtccggcacgagagtggtgatgccggccgacgccatcgcgttcgccacgtcgccgaacgcctccgacgatttgccggtgcccgaaccgtgcaggaacaggcatgcgggacgatctgccggcgcgtcgagcggctcgcgaacgatggcattcacggttttgccgccgtccaacgcgaccgtgatatgcgtttccttggtgcggtacgcgccctcctgcggggttttgagcacggcacctgtggccgggtcaacggcttggatagcggtattggtcgtggtgagcgtgatatggtccgtgaacggctcgacctgccatttcggcgccatcgcattgccgagcgcgcataggaccatggtcagaagaagcgccagcgcggtagtcgccgcgcaggtgacgagaattcgtttcacaatgcttcgcacggtacgccactctagtcgtattcggcgtgcgtggcgcggaaaacacggaatcatggggaatccgcggaacaatcgcaattcctgcgccgcgagtcaatgctcccgtgccgtaaaacaatgcgaaatcaggggaaaatcgcaataatcccctccacaatccacctgtggatatgtggaaacccgtcggtttcgccgcacctttccgccaaaccgacgctgagcgtcctccagccgtcggtttgatattgcgatttccgccaaaccgacgcttagaccctcctcggcgtcggtttcgcggattgggggcgatgggattgacgctgagatgggatttgggggagaaggatgggaaggttgggatggggctaggcgcgggcttcgtagcgacgggtgtagagcaccagcaggatgacggcgagcaggctgatcggcgcgcctgcgatgccggtgaaatggtaattcatcgccgtcgcggtcagtgccgctccgccgacgatggaaccgatcgcattgccgaaattgaaggcgatttgtacggcggcaccggcaatcagctcgccgccgccttcgcccgcctgcaccatcagcagttgctgtggcgatgaattgaagaacagcgcgaaaccgatgatgaacgtcagcaacgcggtggtcgcatgattaccgggcaacaggaagaccagcaacagtccgcacaaggcgatgccgtgcgatagcgccgcggtcgcgcccgccttccacaggtcggtcagcctgccgcccacgatgccgccgaccaccatgccgaggccggcgagcaccatcagtatcggcgccatcgtcgccgaccatccgccggttttctgcaaccacggcgacacgtagctccaccagcagaagatgcccgaattgccgaagaacacggccagcagaatcagccacgggccgggatgggtgaggaagcggaattgccccttgatgccggcgtccttgatcggatcgatggacggcacccacgaaatcaccacgacgatcgtcataagcgcccaggcggccagaatcgcaaacgccagccgccaggacatcgcctcggcgagcaacgttcccgcgggcacgcccagcatgttggccaccgtctggcccatcaccatcatggacacggattgcgcctccttgcccttgtcggcaagcgttttggcgatcagcgtggccgtgccgaagaacgcgccatgcggcaggccggaaatgaaacgcgccaccagcagcatcggcgagcagaaggagacggcgctgagcgtgttgccgaccaacgcgatggccatgaacaggatgatgagatgcttcggcggcaccttgcggccgaacaccaggatcagtgtgccgacacacacgccgatggcgtatgcggagatgtaatggccggccgcgggaatgctgacatgcatggcggtggccgtctggggcaggatgcccatcatcacgaattcggcggcgccgaggatgaaggcgccggaggccagcgccagaatgcttctcttcatggggattccttattttggattgtccgccgaaccagcacttggatggtgccaagcgtcggttcgatattgcgattcccgcgaaaccgacggtgagacggtgccaagcgtcggtttgatggaaaggcaaagaaaaaggcggaaccgaagttccgccttagttgtcgggctggcgggatttgaacccgcggcctcttcgtcccgaacgaagcgcgctaccaagctgcgctacagcccgtttggcaacagttggatatactacacgattgggcgctgtatgcaaggtcggcgtgtcgcgtgttgtgtagtggcttctcggtacacttggggcttatgactgagaccaacgaatcccaagagaatcagaacgaagaagaggccgcagttcccaccatgaccacggtggaacgcgccgaaatgctgctgcagcaggatgctgcgattcgcgccaagatcaacggcggcgccgcgctggacgaggccgtggacccgtccaataaggaattcggcccgctggcccacccggagcaggtgcagatgcgtgtggccaagcgcgccatgatgcttaaggaaggcatccagccgtacccggtgacccttgacgtcaccgccaccatcgaagaggtccgcgccaagtatgacggcaagctcgaagcgggcgacgagaccgaggacgtggtcggcatcgccggccgtgtgctgttcctgcgcaacgcgggcggcctatgcttcgtgcagctgtccgccggcgacggcaccaagatccagggcatgatctccaagaaggagatcggcgccgactccctgaagcagttcaagcagctggtcgacttgggcgaccacctgttcatcaagggccgagtgatcgcctccaaaaccggcgaactgtccgtgttcgccaccgaatgggcaatcgccgccaaggcgctgcagccgctgccggcgctgcacaaggacctgaacgaggacacccgtacccgcaagccgtacatcggcatgatcgcggacgagaagatccgcaacatggtgcgcaaccgttccaaggccgtcgcctccctgcgcaagaccttcgccgaccatgacttcctcgaggtcgagaccccgatgctgcagaccgtgcacggcggcgccgcggcccgtccgttcaccacgcatatgaacgccttcgacttggacctgtacctgcgcatcgcgccggaactgttcctgaagcgttgcctcgtcggtggcatcgaccgcgtgttcgaaatcaaccgcgacttccgcaacgagggcgtcgacgccacccacgccccggaattcaccatggtcgaggcataccaggcctacggcaactacgacaccatcggcgcgctcgtcaagcagctcgtgcaggacaccgccatggacgtgttcggcagccacaaggtgacgctgctggacggcaccgaatacgatttcggcggcgaatggaagaccatcagcatgtacgactccctttccgaggccctgggcgaggaaatcgtgccgaacggcggtccggacaaccccggcacctccgtggagcacctgggcgagatcgccgacaagctcggcgtggaacgcgacgacgtggagaaccacggcaagctcgtcgaacacctgtgggagcacttctacgaggacaagctgtacgagccgaccttcgtgcgcgacttcccggtcgagacctccccgctggtcaagggccaccgttccaaggccggcgtggtcgagaagtgggatctgtacgtgcgcggcttcgaactggccaccggctactccgagctcaacgacccggtcgtgcagcgcgaacgcttcgtggcccaggccaaggacgcgctcgccggcgacgaggaggcctgcgacatcgacgaggacttcctggaggccctcggcgtgggcatgcctccggcaggcggcatgggcatgggcatcgaccgactgctcatcgcactgaccggcgccaccatccgcgaaaccatcaccttcccactggtgaagccgctgaattaacgcgaagcgttaattcatatcggcttcacgtgaaggcggatcaagagaacagcccggtgggctgttctcccgccgtaaccttccttttcggttgaagccactgaattaaggcgaagcacagttcgcaataaatttgatacggactaaagggactgacgacctactcggccgtcagtcccttctgtttttggctggcggcgggtccgcgtgcgcatcaaaaatcatgatgagcggcctccgcagtctgagcagccgccgattaagaatgacgatggtaaatttgaatccatatggctcgctcaacaatggggatgtcaggaaaactgggccgcatatagaatggtgtccatgcaaatatcgacttggattcgtggcgctcgccctcaaacgctgccgctgggtcttgccccggttctggtcggcgttgccgccagttggcggtgggatgctttgggtggcctgcggtcgtgcccggcttttccgggaggattgctggaagagcgtgatgccggtgatgtgctggggcattgtgcgttttctcggccgtggtttgcggtcgttgcgatgttgtgcgccgtggtggcggtcggtctgcagattgctgtgaattatctcaacgattatgccgatggcgtacgcggcacggacgcccgacgaggcagtgacgccgcgggacctcggcggttggtcgcttccggaattgaccccagtcgcgtgttgctggctgccgcggtcgccgctttagccgcctgttccgccggactggtcgctgtcgtcataactggtcgctggtggctgatcgcgcttggcgcaacctgtctgttggcgggctggggatataccaacggtcggcatccttacggatatcggggtctgggcgaacttgcggcattcgtattcttcgggttggttcccgccctcggcacacagtatgcgctaagcgggtcgatcaccgtgacaggagtggccggttcggtgatttgcggcctgctgtccgtcagcgtcatgatggtgaataacctgcgcgatctcgaagatgacgccgcgcacggcaagcgtacgctgatggtgcgcattggcagtgggaagggcaaatgctggtgcatgcgtgcgctgggatgggctgctgggctgacggtggtttttgccatgccattatcggtgtatgccggactgctggatctgctcatagttctgcccgcggaggtggatcgcgaacgttcatgcacggaatatggcatatgcgatgactggtcgtggggaaacgccgattggatgagccttgcggcgttcgtattcatcgcagggtgtgtggcgattgctactcgtgccgtcgcagccgtccggcatgaccagtggcgtcgggcgttgccattgtgctcggtgacctcgttggtcgcagccggcgcgtttgtgctcaatgcctgtcaggtcggtttcatggtgtagctgcatcatgcatttacgatttcgtcattgagcgttggcgattgcttggtgatgcaaacggcatacaacagaatgaaaattgttgcatgaacgtaaccaaataatcgtcatcgacggttgtgttgggcgtgctaggcggtagactggcaggtatgacttacaaactagtactgctccgtcatggacagagcgcatggaataaaaccaatcagttcaccggctgggtcgacgtcccgctgaccgagcagggtgtcgaggaagccaagaacggcggccgcctgctcaaggagaagaacgtcctgcctgacatcgtcttcacctcgatgctgcgtcgcgccatcaacaccgccaacgtcgcgttggacgaggccgatcgcctgtggattccggtcaagcgcagctggcgtctgaacgagcgtcactacggcgccctgcagggcaagaacaagaccgagatccgtcaggagtacggtgacgagaagttcatgctgtggcgtcgttcctacgccacaccgccgccggagatcgatccgaacgacgagtacgcgcagaacaacgatccgcgctacaccggcgatccggttccggaagccgagtgcctggccgatgtggtcaagcgcgttgagccgtacttcaagtccgacatcgagccggagctgaaggctggcaagaccgttctgatcgccgctcacggcaactccctgcgcgccatcgtgaagatgctggacaacctctccgaagaggagatcgccaaggtcaacatcccgaccgcaatgccgctgctgtacgagctggacgagaacttcaagccgatcaagccgcgtggcgagtacctggatccggaagccgccgctgccggcgctgccgccgtcgccgctcagggccagaagtgagtttgttgcgattgggtgcgtgaatagtcgcggctgatcgcatgaaacacatacgaaaaggtgggaacctgcataccgtaggttcccacctttcgttattgccggcgcctttgtcggtaagtctttttcacgttgtatctgcgttttgctgatgtcgccttgcctgcgcggctcggcgggtgccgtgcggcgcaggcaagacggacaaaacggaatcgcaagaacgtcagatcacgccgtattccttgagcaatgtcggaatatcagtggaatccagcttcttcacgatctgcttcaacacacccctttcgatggggttgagcttcatatcggtgatcggtttgccgtctcgcagcatcaccgtggcgttgagcaggttgcgcacgtcatagaccgaaccccacacctccggcacgccgcggtccacgtcgcacagcgtgtacacggcttccatgccggtgcgcatcgaatattcggtggtgaagatcgtgtcgcgcggcgtctccgcgaattggccgaggaacgcgaaattcaccgcgccatccggcaccacatcggggcggtcgccggcggaacgcggcatgaagaacgcatcgatgtacggcatcatcactggaaccgtgttggcgtggttcttcgccaagtcggcgatcttgtcggtcggcacgcccatgtggtacagccattcctcgcagatctcctcgccggtgcaatcctgcattggcttcttcacatagttgccgggcttgtcggggaacagaccatacacccatacgcacagctggtccttcggctggtctcggaactgctgctggcgattcagcgtccagctcatcagccaattggaatcctcaacggtgacgatgccgccggtcaccacacgtccggagaacgggtcgcgcttgcagatcttctggatgtacggcggaatctcgtcgtccaacgtggtgacggtggcgctcatccacttcgaatgctccgggtcggagcagaacacgtccggatgtccgaagctcggatcctgcgccgcgatgcgacgccacatatcccaaccgccgccgggcttgatctccggagcccacgcggccggctcggtctgcgaacccatcgaggagttctccacgcagccgccattggtgatgaacaccagatcgttctcgcccaaatcgatgctgcgggtcgcgccatccgccttggtcagatcgatgcgcgtggccaacttcttggtcggcgagctgaacggattgcgcggatacgcgccgtattcggcctgcttcctcaaaatcgtatcctgcccggtgccggtgcgctggcgtacgggacccatgccgccgccaatcgcgaaatcgacgttctccaccttcacgttgtagtggaactgcacgccgaagccttccagatacttgatcatcggcagaatcatcgactcgtactggttgtagcgggtgaaccgcaacgcgctgaagtccggcagtccgccgatatggtggatgtagcggcggatgtacagcttcatctccaaagcgctatgccagttctcgaaggcgaacatggtgcgccagtacatccagaagttcgtatcgaacacctcatcgtcgaagaagtcggagatcttcttgccgtatagttcctcgttcggtgtgaagaacagcttcatgatctccatcgacgccttgtcggacagcgcgaacttgccgttcgtgccgccgtccacgccacgcgccttagtggagcggcatagcgaatagttcggatcctccttgttaagccagtagtattcgtccaatacggacactccatccgtctcgatggacggaatggaacggaacagatcccacatcacctcgaaatggttgtccatctcgcgtccgccacgcatcacatagccgacgccaggaatgttcgcgccatcgcaggcaccgcccggaaccgggtccttctcgaacacgtggatgtggtcgccgggcatctgcgcgtcacgtaccagatagcaggcggcggacagcgctgcaagacccgtgccgatgatgtaggcgttcttgctatcgatcccctcgggcttctttggccgggcgaatgcttcgtaattgccgttggaatagtacatgacttcctcctttggatgccgctgggcactattgtgccgcgtcgtgggacacaagtatacgggcatgaactggacgcgatgtctagtttttacgactatcggaggaatttcgcttataggtggcggattgcgcctgcatgcgaaagcgattttgcctatatgtggcagatttcttttggaaaaggatgttcgggggcgggatttttacccccttatgatgttttggccgaggtcatctgccacatataagcgagatgggtggcttccaaacggaaaccacccatctcgtcaaggaaaatgcaagaaaaggagaggctcaatcagtcgatgtcggtgccttcatcacgggttggttccttggatgggtcgaaaccggagacgatgaacaccacgcgacgagccgcggaaacggcgtggtctccaagacgttccatgaagcggccgatcaggaccacgtcgatgagctgctggttggtgcccgaccaattctcggactgggccagttcgaaggtcttcttgtgcagcgcatcgagcttgtcgtcgttgaggatgatttcctcggcggtcttggtgtcgcggtcgttgagcatggagaccacctggtcggccacatggtcaaggaacgcctgcatttcggcgaacagcggctgggcatcggccggcagcggggaagcgggataggtgcggcgggccgcttcggcgatgtgacgggccagatcgcccatgcgctcgaacgttgcggccagacgcagggtggagacgaccacgcgcagatcggtggccaccgggttctgcttggccagcagcttcacgcactggtcgatgacgctggattcgagggcatcgatttcgatgtcgccgtcgatgacggcctgggcggcctcaagattctggttcagcaacgcgtcgccggcaccgttgattgccttgcgaacgtcttgcgccatgcggtcgaggtcatcggcaacagccttgagctcttcgttgaagataacgcgcatatgcttgcctttcaaatgcttcacgtttgtcgatatcgggttcggatataacctctcctaagtgtattagggaattggcggattcgcacgtgacggacgtgttgttccgccaatgttcaccggcacgttcaccctgcgttcacgaaaatcgcgtcacgaccattcatcggggaacgtcagggtgtgcgagaatgaagacatgtttgaatccgtaggcacgtggtggcgcaatctgacacatcgccatggtgacgatcgcaacaatgatgatactttggacgacgcgacgaacacgttgctgtccatactgccgctggcctccatcgtggtcgacgagcatgacgaggtgatacgcgcgcatccggacgcctacgcccttggcgtggtgcgggacgacgccatcgccgatgacaccgtggcaagcgcggtgcacgaggtccgtgcccacggcggcaagaagcagttcagcctgaccacgaccacgttgcatgagccgaagaaggctccgaaagcagggaagccaaccatgcgggaggttgccaaacaggcgttgatcggccaatcgccggacaagccggtgaccacggtgtcccgcccgaactggctgaaggtgattgtaggcaggctcaacgaacgctttgtggtggtgctggtttccgacgtgagcgaaaccgtccgtttctcccagatccgtgattccttcatcaccaacgtttcggagcagctcctcaagccgacgcagtcgctggaggagcttgcggacgcgttggaacatgactcggacaataaggccgcgattgaggggaacaccgtaaaactgcgccaatcctgcgctcgcatggaacatatggtgtccgacctgctgctgcttatcaaggcgcaggaaccgattctgccgacggcgagcaaccgtatcaacgtcatggaacaggtgaaaaccgtcgtcgacgcgcatcgcgacatggcgcaacggcgcggcatcgacattgaaatcgatggcgacgaatcactggacatcaacggggaaggcgagcagattcaggccgcggtcgcaaagctgctcgaaaacgccatcgcctattcaccggacggcaagggcataaccgtatccgtcaagccgaacgaggacggcaccaaagtgctgctcagcgtgcttgaccgtggttgcggcattgcacagaaggagcaaagccgtattttcgaacggttctaccgtggcggcaaccagaatgggcattccgaggaaggcatcggtttgggtcttgccatcgtcaagcatgtggcgttgacccaccatggctccgcttcggtgtggagcgctccgggacagggcagcacgtttacgttggagctgccggtcgccagaaattagcggcgattgcagagcgttgggacacgccatatacggcaaagggccgcttccgcaggttggtgcggaagcggcccaatgttgttaccggttatttcgcgattggctgaaccgccggtcgggttattcgccaagacggcggtagtcccaccggtcgaaatgctcccaaaccagcatgagcacgccgatcaccgtgccggcggcgcacatggtctgcaatcgttcgacattgatgccgaaggccagcagaatcatgcagatcaccaaggcgatggcccataatgcggtgccgaacgtgaacaccttccgcaggtcgacgcgcaccggtttgggggagggtttgcgcacgcttgggtcgataatcggagcaaatttcataccgctaccttacctcggtgcgcgcgtcacaggtgctcggccacgtaatcgacgcacttcgtaagcgcctcgacgtcgctcggctccacggacggaaacacgccgatgcgcagctggttgcggccgagcttgcggtagccgttggtgtccacaatgccgttctcgcgcaacgcggcgaccacttgggaagcgttgatgctctcgtcaaggtcgatggtgaccacggcgttggaacgtgcgttttcgtcggaaacgaacggctgcgcgtaatcggacttctccgcccactggtacagcagcgacgcggaacgtgcgcaacgcgccgtggcccaggcgaggccgccattgtcgttaagccagcgcacctggttctccagcatgaccagcgtggccacggcgggcgtgttcagcgtctggtccttacgggagttctcgatggcggaggtcagggacaggaacggaggaatccagcgtcgcgcgcccggcaggctgacgcttttagcgatgccgtaggcgcggtcgatcgcagccggggaaagcacggcgatccacaggccgccgtcggagccgaacgccttctgcggggagaagtagtaggcgtcggtctggctgatatccacgttcagcgcgccggcgccgctcgtggcatcgatcagagtcagcgcgccctgctccttggaaccttcgacacgcttgaccggggccgccacgccagtggacgtttcgttgtgcgcccagcagtaagcgtccacatattcggtgagctccggcaggcgatacgtgcccggtttgcccgcgaagatctccggatcctcaaggaacggcgcggattgcgcggacttggcgaatttcgcgctgaaggagccgtacgtgccgaacgccgccttgcgggtgataagcgacgcgcaggcgatgtcccagaacgcgctggcgccgccgttgcccagcacgacctcatagccgtcgggaatctggaagaaattcgacaggccttcgcggatggagccgaccacctgcttgaccggggtctggcggtgcgaggtgcccagaagattgcgcgcgcccgcgtcgagcgcctggacctgctccggacggattttgctcggccccgagccgaaacgtccatcctccggaagcatgttggtaggaatgttcacagtgttcgtcatgtcatccaagggtagtcagaaggtcggattgcgcgttgatatggccgttttccggacgttcctccacccgtggcgaattatttgcgcaaggacggggtcttgatgataatccctatgtcggtgtacccttacccttgtgacggttctgtaaccgtgcgcggtcataagctgcgacggtttcgcaatccgcaaggagtgattaatatatgaggcatgcggcgcataaagctgccaaggtttcgcacgcgcaattcagcctatccaaggcgttgttcacggcgaaccggggctcccataccgctaaggccgtgcgaatggcacagctggcggaaggcggcgccgtagtcggactcgctccggaagtcgtggataaactgaatgaagtggctccaatgagccgccgtgccatgcgtgaggccgccaaagccgcttcccgcaaatccgcgttggtgacctccgcttcgttggcggcgcttgtcggcaccgcggcgaccgcgttggcgttcagccagcagaacgcatcccgactggtgcttgcggacgacggtaccgaaacgtcccagatcaaacgtgtgtccgatggagcggcatcccgttccgaaggacgtaccgcccttaaggaactggcttccaccagcaacaacggcggttggcagctgggagacaccagcgcctccatggacgccagcctgatgtccaagtccatcgccgacaatccgaacgtcgccgtcctgatggaccaagacagcagcgccttaccggctaacttcaatccgaaccatgccaccggagacgtcggcaacgcctacgagttcagccagtgcacgtggtgggtgtatgtgcgccgccatcagctcggtctgcctgcaggctcccacatgggcaacggctgccagtgggccgattcggcccgcgccttgggctattgggttgataacacgccgcgccatgtcggcgacatcatcgtgttcgccgcaggccaggaaggttccgactcgtattacggccacgtcgccatcgttgagaaaatcaacgacgacggctcaatcgtgacctctgaatccggcgcctccctcaatggcggcacgtattcccgcacgctcacgaacgtgggcgatttccagtatattcactactgagtttccctaccgacgaccgtgccccttttcttgtaagagggatgctgtaagctaaggattcgatgaagcatattaagcattgttccgtgattgctgcgctcgccgcggccgctcttactttcgccggggtggcacctgccgcgctggcagccaatgatggcgccacgcaagatgctgtcgttgctacccgttcgttcccgaagaccaacgccgtgaagaagaacatcctcgcggaggcatcgtccacccaggtcgaatccgattccgactggggcggtgtggaaagcctgaacgttccccaaaccaaatctcaagccgaaaaagacgccgaagccgccgcagcggcagcggaacagcagcgtcagcagcaggcccaggctcaagcacaggcccaagccgcttctcgttccgccgcgcgaagcgacctcagcagcagcggttccttcaccgtgacgccgcctgatggggccagcgtgtccagcctgctgacgttcgcgaaccagttcgtcggcaaggttccgtatgtgtccggcggcaataccccgtccggttgggattgctccggtttcgtgcagtatgtctacggccagatgggcgtttccctgccgcattactccggtgctcaggcgactgtgggtcgcgcggttggcagcctcgccgacgcgcagccgggagacatcatcgccaatgcgcagcatgccgcgatctatgtcggcaacggcatggtcatcaactcccagctgaacggcacccgctacgatcccatcgcatgggtgttccccagcagctacagcattcgtcgaatcttctgaagctttgacattgagctaagggcgtatttccgtgaggaatacgcccttttgctttgttattttccgcgtcgttacttgaaaaccgcatgtcgcgcggtatggtggaagtcaggtgcaacgcatagtcgcgttgccgcaacctgattcaagggaggtcgctcatgatcaatgacaaggcaatcctcgtaggtgtcgatggatcccacgccagctacaaggcgacatggtgggcagcaaattacgcgaagcatgcgggactgaccctgcagatcgtctgcgcatattcgctgccaagctatgcggcagtgtcgttcgatgccacgtatacggccatgggcgatgacaatgccgcgcacaacgatgcgcaggagattctgtcgaaggccaaggccatcgccgacgagcagggcgtcgaggcatcgacgttgatcgtcaccggagatcccgcatccgtgttcgtcgaactgtcgcgcaactacaacctcatcgtcattggcaaccgtggcaagggtggtctggccgaacgactgctcggcaccaccagctccagcctgccggcatacgcgtactgcccgatcgtcgtggtgccgtacaccgacgacgaaggcaacctgatgcacttgaacaacaccatcaccaaggtggcagtcggctccgacgaatccaagtggggtctgaaggcgttggagatcgcggccgcgttcgccgattcgtggggtgccgagctggacgtcatctccgccgtgccgaacatgaagggctccgaggatgaaggcgtcatggcgtccttccaggaggatctggatgtgcgcatcaagccgcttgaagaggcgtacccgaacctcaagatcaacaagcagatcgtgcccggccccgcagccggcgcactgaccaaggccagctacgatcatgacgtcgtcgtggtcggctcccgtggtcgtggcggcttcaccggtctgctgctcggctccaccagccagggtctgctgcagcatgcggtcggaccggtctacgtggtgccgcgcaagtatgtggaagccgcggaaacccgtctcgacaccgtgccgagctcgcctgccgacgtcacgccgaaggcgatcgacgacatcaagggcgtcgaggaagtgccggtcgacaaggccaagccggaagtggtcgaagccatcgaaacgaagatcgatccggaccgtcagtgacggtacggcaaatcgactgaaatcgatataaaaaccgcatagaagagggtggctgcgattccaacgaatcgcagccaccctctaactatgtgcggtacgtgtgctcagtgcttgacggtgacgttcatacgcaccggcgtcggctcgacgtacgtatgcttgaccgtgcagcccttctcgatatgacggctgacgcgatcggcgagcttttcggcgtcctcgtcgctcaaaccggcgtcggtggcgtcgatgaccacctgctcgtcgaaaccgatgtaggcgtcggtatcggcatcatacgtgccgtccaccacgatcttcgcgcccttgccatcgcccaacgtatgctcgacggcgaactggctggacaacgcggcgcaaccggccagcgcgaccttcatcagatcgcccggcgtgaactggccacggcctttgccgaatttgatgtgcgcgccatcctcgctgaacgcgtcccaggaaccgtccttgttgcgctctacccacagcctcttgcccatggaaactcctcatgtcctgtggcgcgccgttcgcgccaatccgtgataccaatctagcgcatcgaaacggacgtgggggagtgcgttccgcaagatgaagcgatacggttttgtgattcgttgcgattgcgctggaggccggcggacggccgggatgcgcgttggcggcacactcaaggccgttcggccaagcttacggccttacaacgcgcatcccggccgtccgcctccacgccaccggctaaacttgcctattatggctttgacttccgaacaactcgcagacattcgtactcgtattcccgcacgtccggaaacggacattcccatgccttacgaggatctggtacgcaaaatccttacggaaggcacactgaaatccgaccgcacgggcacgggcactatttccctgttcggccagcagatgcgtttcaatctcaaagacagcttcccgctgctcaccacgaagacggtgttcttcaaaggcctggcctacgagctgctgtggttcctcaaaggctccacgaacgtacgttggctgcaggagcacaacgtgcacatttgggacgaatgggccgacgagaacggcgatttggggccggtctacggcgcgcagtggcgtagctggccggcgccgacgccggacgatccgaaccgcacgatcgaccagatctccaatgtgctcgacctgatccgtaaccaccccgattcgcgccgcatggtggtttccgcatggaatccggcggaagtggagaatatggcattgccgccatgccacgccctattccagttctacgtggccgacggccgcctgagctgccagctgtaccagcgttcctgcgacatgttcctcggcgtgccgttcaacatcgcctcctattcgctgctcaccctcatgatggcccagcagacgggactcgagcccggcgaattcgtttggaccggcggcgactgccacgtctacgacaaccacatcgaccaggtgttggaacagctgagccgtacgccgtactcgtatccgcagatccgcatcaggaaggccgattcgctgttcgactacgattacagcgatttcgaaatcgtgaattaccagcatcatccgaccatcaaggcaccggtggcggtctgaggttgttgccgccgtctggcgcgtctgcgccagacggtagactactgaccctagttccgacttcaaggagtgagtgaaatggagcacgatagtagccgcagtggctatcacgaacccgagcccggacttgccgggcgtgaagacgaggaggattggggcgacgatttccccaaaaccttctctgtgaatctgatttgggcgcaggcctgtgacaaggaaggtcacgacggtgccattggattcgaaggcggcatgccatggcatctgcctgaggagatgaggcatttcacggagctgaccgtctcccatccggttatcatgggccgcaagacgtgggagtcgctaagcccgaagttccgtccgctgcccaaccgcgacaacatcgtcatctcgcatgacccgtcctatttcgcgccgggcgccaccgtggtggattcgctggatgacgcgttggatctggcccgtcaggaggccattccggatgacggcttggaccgcagtgaaatctgggtcatcggcggagccaaagtattcgaggaagcgatgccattcgccgacaaggcgtatgtgacgcagatcagcatgcacgtgaacgccgacacctacgcgcccgatatccacgcattggtggaatccggagcatggcgcgtggccgaggaaggcacgtggcagaaggcgcggaaaggaaacgaccaagtcgaaggcttccgtttcgtgacgtacgaaagaaaccacgaggagtaacttctcatgtataccgtgatgaccgtgtgcacgggcaacatctgccgttcacccatggctgaaatcattctgcgcgccgaattcgagcgccgcggcttggctgacaaggtcaacgtcgaatccagcggcgtcagcgacgaggaatacggcaatccgatcgaccgccgtgccgtcaaggtacttaaggaacgcggctacgagctgccatcgcaccatttcgcgcatcgcatcacgcgcgacgaaatcgaacgtaccgacctgttcctgccgatgaccgcctcgcacatgcgcgcgctgctccgtcagctgccgcaagccaagcgcagcgaagtgcacatgtaccgcagcttcgacccgaatctgccgaagccggccgcgggacgtgaggacagcatcgacctggtggatccgtggtacggtggtccgcgcgaattcgaagtggcgatcgaccaaatcgaagaggtggcgccatatatcgtcgattgggtcgaacagcagttgcagaactgattttttattgcgattgcggcatgcttgatggtttcaagcgtgccgcttttgttttttgcgatttattgcgatttttttttggggggggctggctgtgttgtgaagttgcgatttttctgatgttgcggtgtttggtgggattgaatatacggcgtttttgcgatgttgcgattgcggggtgtccggtggaggccggcatatgcgttgcaaggcacactcaaggccgttcggccgagcttacggccttgcaacgcatatgccggcctccacctcgtttttattggcaggttgcgatgttacttcgttctgtgggtaagttgcgttttttgatttttgtggggcgcctcgtttttgtgggcaagttatgtcttgacggttgggaagcgtggattggcgtgggaggggagagtgagggtaaaagaaaaaccccggcggattgggctggggtttggtggcgaccacggccggacttgaaccggtgacctccgccgtgacagggcggcgctctaaccaactgagctacgcggccgttgtttcggtcttgcgactgacaacagatagaaatactacggcaaaatcgcaattatgcaaaactgcggcgtgtcacggtgtgttgggcgtggcgcgccgcggtttcgcgggaaaggagacgaatctcagtcggtctgcttccaggtgtcgacgtcgatgtggtgctccgggttggcctgccatgcgtcccaagcggacttcacaatgtcctcgacattgtacttggcgtgccagcccatctcctcgttgatgcgcttcggggagccgatcaggtgcggcggatcaccggcgcggcggcccatgacggtctccttgaacggcagaccggtgaccttcttgacctcatcgacgatctggcgcacggaggtgccctcgccggtgccgacgttgaacgcgtcatactttcgctcgtcgcggtccagatacttcagcgcggcgatatgcgcgtcggccagatcggacacgtggatgtagtcgcgcacgcaggtgccgtccggagtcgggtagtcgtcgccgaagatcgccggggccttgcccttcttcagacggtcgaacagcatcgggatgaggttcaggatagccggatcctcaagttccaccgggccgcagccggccacgttgaagtaacgcaggccgcagaagcggatgccatacggttcctcgcaggcgcgggccatccactcgccgaacagcttggtctggccgtacgggttgatcggcagcatcggcacgacgtcttccggcaccacatcgaccggcggcacgccgtaggtggcggcggaggaggagaagacgagcttcttggcgccggaatcgcgcatgccgatcagcacgttgagcatgccgttgaggttctgctggtagtaccacagcggcttctcgacggattcgccgacctgcttgcgggccgcgaaatgaatcacggaatcgacgccttcggccttcatgatctccgcgaggcgctcgccggcgcccggagcggcgatgtccatgccgtacaggcgggagccttcgatgcgggtgggcttgccgtagctcagatcgtcgacgacgacaaccttttcgccggcctgatgaagtgcgtgaacgacgtgggcgccgatgtatccgcacccaccagtgacgagaactgtcatgttctggcctttccttcgaatgagcagtaaagcgcaacagttggtgaaaatgtcaaccattgttcacttttgctcaggtttgttaccttttgaacaatttgagtataacacgtgaacacgaacgcacactaacggctcgttcctgcgtttcctctataaattagggtatgcaacatgacgaaaacacgccgaccgatggtcgcaaaacagaagaaaacgcacagaatatacaacatgtgcagtcggccgctgctgacggcaggccggccctctacggtcgcaaggtgctgtccttcgtgcggcggtccgcccggctcgacgcgcgactgcagcgggcctggggcacctacgccgatacgtatctgctgaacatcaacgcgggcgaagggtccctcgacgtgcgtgagggtttcgtgttcgaccaagcctatatccgcgaaacgtggggcaataccaatcctctgatcgtggaaatcggctccggacaaggcgagaacgtcgttgccgccgcagccgcccggccggacgtcaacttccttgcgctggaagtctacgatccgggcgtggcgcacacgctgctgctcgccggcaagcagaacctgaagaacctgcggatcgcccagatcaacgcgccagaactgttcaaggcggccgtcgacggctcgatcgccgaagtgtggacgttcttccccgacccgtggccgaagatgcgccatcacaagcgccgcatcgtacagcccgagctcgctgcggacatccaccgcgcgttgacggacgaaggcgtgtggcgcatcgccaccgacatcgaggattacgcgctgcacgtccatgaggtgatggacgagctggacggcttccataacgacggcgcattgaccgtgagcctgcccgtcgagcacgtcggcaaaggcaacgcggatgaggcggccgcattgcgacacgccgatttcgctgaatccgagcgattcgatggccgtgttttgaccaatttcgagaagaagggacttgccgccgggcgcgtgattcacgatttcacctatcgtcgcgtgtaatgcgataaggcttggaatttcagtgttttacgaggattcctgtcttattgtggcggtgtgtgacaccggcgcgacacgccgaggtttgcatgtcggccagattcgcgtatagtagggcaagttgtcaagcggaaacgctgaaagcgcccccttcgtctaacggttaggacaccagactttcaatctgacaacgagagttcgactctctcagggggtacgtaccttggaaacaaggtggcaatggccgcgtagctcagttggttagagcgccgccctgtcacggcggaggtcaccggttcaagtccggccgtggtcgctagaacaacgcaagttgttcatggctctgtagctcagttggtagagcgaacgactgaaaatcgttaggtcagcggatcgatgccgctcggagccaccagatacaccccggagcaatctggggttttgtttttctcgcatatcttttccgatttacctgcgtgatttccgctcgttttccaacacaagcgccatccgaaccatatcggcgaaagacatacgcccattacccccaacgaagggggatgttctgtcccctctgttgctaaactatggtgcaggtagacaaggggttgacggctgtactgttccatgatgttgacctctaaacgggtgtatccctggggtgaggcgagtggagatactgttaatcggcaacaccgacttcgtgacgaagcagtggatcgagcacacgttcccccaagacaaggtggtggtggccctccgcaaagggaccgaatccagcggcgaggatctcaaaatcatcgacatgcccgaccgtgacgccgtgtcggaagtgttctccaactacgaattcgatcgaatcgtctacttctccgaagatctgacgccccgcagcgaacgtgacggcgacctgggctacctgcgccgactgctgcacaccgtccgcaatcgcaaggtccagatgctgatggtgagcgggccggaatcggaattcgcctatccgcaggaaacggacgtgcacgagaccagcaaaagcctgatgtcgcgtgccggcgaagagctcggcctgtactatgcgcgcacctacgatctggaagtgaagatcgtgcgctgcccctatctgtacgcgccgcaacgcaatggcgtcaccgcatatttcaacggcttgttcgaacaggcacaagcgggagaactgcgcttccatgaacgcgccgaacaacgcacctgcttcctatgcgccgacgatctggccgaacttatctaccgcatattcgacgactggaccgccgacagcgagctgttccacgttccgaacgtgttcgacttcacttacggcgatttgggaacgctgatcgcgggatattttccgggaacgaaggtcgtatacggcgaggaccgtccgcaggcataccccgccgacgaccacgaattgcgattgcggtacggcttttcgccacgatactcgcttcgcgaggattttccgcacgtcatcgaaggctggttgaagctccgcgagaacaaaaccgacaagtatccggtatgggatttcctacgcagccacaacaaatggtggaccgtgctggaaatcatcggcgcgttcctgctgacggaatggctccgcgcttttacacaaggcaacagccagctggaaaccgtggacctgcgattgctgttcgtggtgatcgtcggcaccatctacgggctgcatgccggcgtgttcgcagccgtactggcctgcgccggcgtggccatgtcctacgcgtcgcagggcgcgtccttcgccccgttgttctacgacacatcgaactggcttgccttcgtcatttatttcgtggccggatcggtatgcggctatgtgcagtcgcgcaaccaggagagcgtgaggttcgtgcgcgacgagaacgggttgttgcgcaatcgtctggacttcctgcgcgggctgtatcaggatgtgctcgacgaccgcagacagttgcgcgaccagatcatcggcagacgcgacagtttcggcaaactgtacgccgtgacccgagaattggacgaagtgcaaccgcagaagctgtaccatacggcgatccgcatcatgcaggaaagcctcgatagcgacagcctcgccatcttccgagtggacaacggcggacagttcgcccgtcttgtggcggcgagcccacggttcgacgtcggcagcttccgctccgtacgcgtctcggattacggtgaaatcatcaccgcgctggaacacaacggcatatgggtgaaccgaacgttaagggacaaattcccgatgtacgccgtcggcgtgcgtgaccgtggcgaactggccgtgatcatcaccatgggagagaccaaaccggaccagatgaacctgtacttccagaatctgttcagcatcatgtgcggtctggtcgaatcggccatgatcagggccttcgaatacgaggacgtggcgcgccggtccatgctggtgccgggaacgaacctgctgaagccagaagcgttcctgccgaaggcgctggctgccaacgacctcaaacacgaccatatgggcgaccatctgctgctcaaagtcgaatgcgagggaaaccttgaggaggtggactccctgctgatgcaaagcatccgccagaccgatgaggccggcatgctgacggatgacggcgtgtatctgctgatgaaccaggcgggggagaaggaactgccgatcatcctcaaacgtctgacccgttccggcttgcactgctcctacgttccgcagacccaagaggatgccctgctttccgaagcccaatcgcatatcgcgcaagccgacgatgggggtgaaagctgatggggtcgacgactatcgccgcgttgatcatcatcgccgtgcatctgctggtctgcatgacgctgtgtctgctgcaccacgtcggaatgctgaaagtcgatggactgctgctcccgttcatggcgttgattcccctatgggggccgctgagcgtggcgctcatgcattcgcgtgccgtgcttcgtgggggacgacggattcccgccggtctgcaggaactgaaggtcgaggatcaggaacaacgcaacattcttgtggacgaccgtacggattacgccaacaccgtgccgttggaagaggcgctgatcgtggacaatccacggcagcgtcgtaatctgatgctgtccattcttaacgagaatcccggccaatacgccaatctgctctcccaagcccgtctgaacgaggacgtggaagtcgtgcattacgcggccacggccatggcgcagatcagcgcgaaggaagacatcgcgttgcagcaacgcatggaggaatacgagcggaaccgcgattcggacgaggcgctcgaccggtaccgtgaggcgctcgaacactacttgaaatcctccatggaacaggggtatgccagaacgttgcagatgcgccgatacgccgacctgctcgccgaacagctcaaacggcataacgactaccgcaccgtatgctcgttggcgaagacgcagatggatctcggttcgttcgatgccgcgtctcgcaccatcgaagcggcgctgtccgcatggccgcgtcaaggtgacgtctggctgatgaaactgcgattggaagccgcacgtcacgatggcgaggcggtgcaacgcaccgtccggcacatcaaggacgaccacatctaccttggcggccgaggccacgacatcctgcgattctggctcggcgacaaggaggctgggcgcgcatgatacgttccgcatggcgcatatggaagcgcttccgttggaaaaacctggtccgcgtgtgggccgtattcatggccatcgccttggtgctgttggcgcaaaccttgggcatccactacggcgcgacgaaattcactttgaaatacatggctcgtaacgaggccattccggcccagaacgccatcatggggcagcgcgccacgaacctgatgctcgtggatagttcccaggatggtgtggacgaggccgaagccatgatgaaacaggtgctgctcgacatgaaagtgccgaccgtcaccgtggatctggccaaaaccgatcccgacgacatcccctcattgaatcggtaccgcaccgtgctgatcgtcatgccggaacttgattcgctgggggatgagctggtgtccatcatgagatgggttgaaggcggcggcaacatgatgcttgccatgacgcctgaaaaaacaggctatctggacgcgatcgggcctcaaatcggcatcgaatcctccgcatacgactacgtgatgaccaaaggcatcaagcctgccagggactttatgctgggtggcgggcacacctacatgttcagtggcccgttcaaatcgtcgttgagtctgaacctcaatgagaaggccaccgtcgaagcggtcagtgccaacggccatacgccactgatctggagtgccgatgtgcgttccggacgaaccgtgacctgcaatatcggcatctatggcaaggtggtgcgcggcttctatgcctccgcgttcagcctgctgggttccgccacggcatacccggtcatcaacagcgccgcgttctatctggacgattttccatccccggtccccagcggagacgccacctacatcaaacgcgactacggcatgagcatcgccgacttctattcgaaggtctggtggccggacctgaccaaacttgcggaacgctacggtattcggttcaccggcgtgatgatcgagaattacggggacgatacgaaagacgctcccgtacggcagaaggacgaatcgcatttcagctatttcggcggactgctgctcaaacagaacggcgaaatcggctaccatggctacaaccatcagccgctcgtactgccgaacaccgattatggcgacgaatacgcgtaccatcagtggccgaatcgcaaagctgtcgtcgcctcgctgcgcgagctgatcgcattccaaaagtccgtgctgccggcggccacagcgtcggtatatgtgccgccgtccaacatcctgtccaaggaaggacggcagacaatcggacgagacgtgcccgaaatccgcaccatcgccagcacctacctgccaagcgacagcaaactgccttacgtgcaggaattcggtgtggccgatgacggcatcgtcgaggcgccgcgcatcgtctccggcggcatggtgggagattacatgcggctcgccgcagaatccgaactgaacatgcatttcgtcagcacccacttcatgcatccggacgacatgctcgaccccgaccgcggtgcgaaggagggttgggccgtctacaggaagggccttgagaactatctcgactggcttgaggcgtccgcgccgtccatccgcatgcagacgggtacggaatgcgcgtccgcggtgcagcgcttctccggattgaccgtcacgatgaaggaatcctccgatgcatgggagttcgatctgggcaatttcaaagaccaggcatggctgctgttccgcgcgaaccacggaacgcctggcaggattcgaggcggaaagctgaccaagatgacaggaaacctgtatctcatcaaagccacggattccacggtgcgcatcgaccgcagaaacgggggagcggcatgagaatctgcttggtgttggaaggatgctacccgtacgtgcatggaggcgtgtccacatggatgcacagctacatcaccgccatgaaggaacacgagttcgtgctgtgggtgatcggcgcgaaagccaaggactgtggcaaattcgtgtacgaccttccatccaacgtggtggaagtgcatgaggtgttcctcgacgacgcgttgcgtctgagcggtgaacatgcgaaagtgatcttcaccgacgaggaagtcaaggcactgcgtgagctggtgaatctgagcgatcccgactgggacgtactgttcaacctgttccacaacaaaggcgtgcatccgctgtcgttcctgcaaagcaacgaattcatcgacctgtttacgaagatctgcatggaggaatacccgtacgtcgcctacgcggatgcgttccacaccgtgcgatccatgctgctgccggtgctgtacctgatgacgggagaagtgccgaaagcgcagatctaccatgccatctccaccggttacggcggcctgctggcatgcttgggcggcagtatcaaccacgcacccgtattactaaccgaacatggcatctacacgcgcgaacgcgaggaggagattctttccgccgaatgggttgcgcccgcgttccggcaacggtggatccgtttcttcgccatgctgtcacaggagatctaccgtagggcatggcgtgtgaccagcctgttcggccgcgctcgccagacccagatcgacatgggcgctccggcaagcaaatgcctggtcattcccaacggcatccaatacgaacggttctgcgacattccactcaagcctgaggacggttgggtggatatcggcgccgtggtacgtctggctcccatcaaggacgtgaaaaccctcatccacgcgttcagcgaactgtcgaaccgcgtggacaatgtcaggctgcacatcctcggtggtgtggacgaccaggactatgccgacgaatgctatgagctggtgaaacagcttgaagtgaagaaccttgaattcaccggacgcgtgaatgtggtcgaatacatgcgcaaactggatttcacggtgctgaccagcatctccgaaggccagcctctgtcggtgttggaatcgttcgcggcggcccgcccttgcgtgaccaccgacgtgggctgctgccgtgaactgctggaaggcgaggaaggcgacgacctcggcgtggccggcttctatgtgcctccgatgtaccgcgagggccttgcccgcgccatggaacgcatgtgcgcgagccgcaagctgcgcgaagccatgggccaagtgggacgcgaacgcgtgaaaacctactatcggcatgagcgcatgcttgacgaataccgtgcgctgtatctcgataccgccgaccattacgggttggagcactgatatggcgggaatcggattcgaactcaagaaactgttccaccgcaagggcctggtcgccatggtgcgcgcctacggttatgccggtgtgatctgcaccggaccgatgctgctgggcatcctgctgcagttcggcgtgctggcggtcagcggttggtggcacgtgccccgcgcggaccagaatctgctggtctgcatgatcacgtacacgctgctcgcctcattggtgttgaccagcttcctgtccatgccggtgacgcgtttccttgcggacatgctgttcgaacatcatgaggagaccattcttccatcgttctggggatccacgaccctcatgctggcggtgggtgcggtgctgtacgcggtgttcctgctgttttccggcgcgaccctcatgcaggggttactctgcctatggctgttcctggaaatgatcgtcaattggaatgcgatgagctatctgacggccatcaaggattaccaaggcatcatgtggtcgttcgtcgcggcggtggtcgtggcgttcctgtccgcatgcgcgatgatggcgctgggcctgccgcaggtggaaagcctgctggccgcagtggcgttcggctacggcgtgatgatggtctgggacgtggtgctgctgcaccggtatttcccgcaaagctcggaaagcccgtggacgttcctcgcatggctggaccggttcctgccgctcgccctgacgggactgctgaccaccctcggcttgttctcccacttggtgatcacctggtgtggtccgcttggcgtgcatgtgaagggactgttctacggtgccccctactatgatgtgcccgcattactggcgttcctgacgattctgatcaccaccgtgaatttcgtggtatcggtggaagtcaatttctatccgaaataccgtgcctactacgcgctgctcaacgacggcggcaccgtgaaggacatcgtggtggccgaacgcgagatgctcgccgtgctcaaccgtgagctgtactacaccgcgttgaagcagctgttcgtcaccgcggcggtcatctcgttggaaaagatggtgttgggcgtgctgccgctcggtttcaacgatggcatgcatggttatttccgtgtgctgtgcgtcggatacgccctgtacgcggtcggcaacaccgtgctgatgattctgctgtatttcactgattacttcggcgcggtgtgctgcgccgcgatattcgccgggtcggccacggtcttgactgtcatttcgcagttcgttccggtcgcgctgatgggatttggcttcctgctgggcgcgtcggcgttcctgctggccgcggtcgtgcgattggcggtgttcaccgacaatctgccgtatcgtgtgctcggcgcgcagccgattgtggcgaccgaaaagcgcggatggtttacgaaactgggcgaagcgttggacgaattcggcgaacggctgcatggaactttcggacggaaggaatcatgagggaaagcgtggaaagcatggaaaggaacggacgaatgacgatgggtaatcggccgtgcggccgcaatgccatattcaaatgcgtggcgatcatcgccacggtcgtgacgacgttctcctgcgtcgcctgcggaaacgctgcggacagtggttccacggcagacaaatcggcggcgcaatcgcaaggaaagcatgagaaagtcaagaaaagcgccacgcaggggcttgacggcgcgcatctgcgtgacaacgactcgctgtacaaggtgtatgacgacagcggtgtggaaaccatgtatctgacggtctcgcgcggcaacaagtcggaaggcaccgaccacagttggagcgaaatcaaccagtattccgtggatgattacgcggccatgcgcaccaaccggtaccaagtcaacggtctgctgcaggtcggcgacgaacaggggcctgtatccggcgaactcggctacggtgaaaaagcgccgaacgccaccgtgcaggtgcgcggccagtcgtccagtctcaataagcagaagaactacaaaatcgagctgaaaagcggcaaaggcaaatggcgcgggcagcgcaccatcgcattgaacaagcatatgggcgaagggctgcgattccgcaacaagatggcatacgacctgatccgcggcatcgaccagatgatgggactgcgcacgcaattcgtgcacctgtacgtcaaggacgaaacctccggttccaactccttcgacgactatggcctgtacacgcaggtggagcagctcaacaaaagcgcgctccaagcgcacggcctcgacaagaacggccagctgtacaaggtcaactacttcgaattccaacgcgacgcggacgtgatcagactcgccgacgatcccaaatacaatctgtcgaaattcgaggagaagctggaggtcaaaggcaacagcgaccataccaaactcatcgccatgctcaaccagctcaacgattattcggtgccgatgagcagcatcctcggcaaatatttcgatacggaaaatctcgcatactggatggcgttccagctgctgaccggcaacaccgacacgcagagccgcaacatgtacctgtacagccctacgaattccgacaccttctatgtgctggactgggacaatgacggcatgctcatgcgcaaggagaaccagatccgcaatatctccaccggttccagctgggagcagggagtcagcaactattggggcaacgtgctgttcaaacgctgcctgcagaccaaatcgttccgcgacgaactcgacaaggccgtgaagcgggaataccgctatatgagcgcaaaacgcatcaatacgatggtggaccactacgagtccatcaccaggcagtatttgtggaggacgcccgattccatgtacgagccgctgacgcgcgcccagtatgacgaagtggcggggcagctgcacgacgaggtcgcgcagaactacaggatctacaaagaaagcttcgacaagcccatgccgtttttcatcgacgctccacaggccgcagacggcaaactcaaattcagctgggacgcctcgtacgatttccgtggtgaggatctgagctacgacgtcaccgtcgccaaggaccatctgtgtgaggacgtcatcttctccaaaaccgatctggcattgccggagacggtgacggacctgccaggtgacggacagtatttcatacgagtgcgggcgcgcaacgtctccggcaagacgcaggacgccttcgactactacatgaccgacaccggcaagacgtacggcacgagatgcttctacatcaaatccgggaagatagtggaggatgtcaatgcgcggtgatggcggggcgtcgaaactgctggaacgggtccgccgccgtgtcggcgaggagctttccatgcctccgcgccgctgtgaggaacattaccggcatgagctcaagtatctgatttcgtacgggcagaaagccgatctgaacttgcgtttggctccgttgcttgaacaggacagccatgcgcgtggcggctgctatatgattcgcagcctgtatttcgacgattattggaacaccgcctaccaggagaaggtggacggcgtgctgatgcgcaagaaataccgtatccgtatttacgattacagcgaccgggtgatcaagctggaacgcaagcgcaagcgcgacagctggatatacaaagaggacgcgtcgctcacgcatgggcagttcgatcggatattggccggcgatgtcggatttttggaacacagcgaagagccgttgtgccgggaattctatgtggaatacatgagcaatgtgctgcggccgcgggtgatcgtcgattacgagcgtgagccgtggatcctcgacgcgggcacggtgcgcatcaccttcgatatgaacgtgcgcgcggcggtggatggattcgacgttttcgaccgtggtctgcccactctgccggtacttgagccgggcaagctggtgatggaggtcaaattcaccgaattcctgccgcagatcgtgcgtgacattctgccaggcaaggcgcaggagataacggccgcctcgaaatacgtgctgtgctatgacaaagcctcgtatctgcggggtttcgactactggcaggaaggctggaacgtgccgagcgtgtgacttgagtgcaccggtcggacgtatcgcggaagaccgaaaacagacggacgaaaacgcgcagccgaaaacatcggcaatcgtagaaaacgtaataaccgaacaatcgcaaaagagaaaacgaaaccatgagcgtaaacgacatgatcaagaaatcggtgctgaactccttcagccaatacaacgtgcccaaaatggcgctggccctgctggtggcgctgctggtgggcatcgtcatctactgcgtataccggcggttctacacgggcgtcgtgtattcgcgcagcttcgcggtgacgctggtgggcatgtgcgtgctcacctgcatggtcacattggccatcagcacgaacatcgtgatctcgcttggtatggtgggcgcgttgtccatcgtgcgttaccgtaccgccgtgaaggatccgatggacctgctgtacctgttctgggccatcacgtccggcatcgcggccggcgcgggcatgtatctgctggtggtggtcgccggcgcggtaatgatcggcatgctcgccctgttctattcgcatcaggacaagggccgcgtgtacatcgcggtgatccattacgcttccgacgcggtcggggacgacatcacgcgcgcgttcggccgcacgaagttcttcgtcaaatccaaaaccatgcgtggcgaccatgtggagatggccgtggaagtgttctgcgacgacaaggacatgacgttcgccgagcggattcgtgccatcgagggtgttgaggacgtcaccctgatacagtacaacggtgaatatcacggataggacgtggtgacaggaaggaatctgtttggctgacacaccggaaatgggcaggacgccgtccaccgacgagcttgtgccggagctgacgttcgacgagatcgaccgtgcgttcgacaacaacgagttctgcttctacctgcagcccaaatgcaatgcggctacgggtgccatcgtcggtgccgaggcgctggtgcgttggaaccactccaaatatggtgtggtatctccgggcaggttcgttcccatgctggaacaggccggacaaatctcccgactggacgtgttcgtatggcgttccgtggtccggatgctggcacgttgggaacgtgagggccgcaatctggtgccgatttccgtgaacgtctccatggtggacatcgaccagatggatgtggcggacacgctcaccggactgctgaacgaatacgatgtcgacgctcggctgctccaagcggaaatcaccgaaagcgccgtggccaggaacctgtccaaagtggaaagcaccatccgcaagctgcatgcggacaacatcgcggtgctgatggatgatttcggatcggcgtattcgtcactgaacatgctcaaggacatcaacgtcgatgtgatcaaacttgacatgaaattcatcgacctcgatgaggacaatgccagcaaagggctgaaaatcgtcgaatcggtggtcaacatggccagaaagctgcgactgctggtcatcgccgaaggcgcacagaccaaacagcaggtcgaccagctgctgtccgtgggatgccggtacatccaagggtattacttccacgaaccgcttccggtgggacggatggagaagctgttggccgaacgtcccgacgaccggcatttctgggatatgtcaaacgatttcatgcatggcagctatgtgcccgtcaacggccgtaccatgcttgagacgtccgcgctcgccgccagcaccttcgagattctggccaatggcgtggcggaactctcccgactgaatgtgaagacgggcgagtaccgcgcggtcaaacgcgatggcatactgccgacgccggaaaccgatgatttcgaaacctacgtgcagacgctgatcgccgaacgcgtggtgcatccggacgatgccgacaggttccgtgctgatatggatctggcttcgctccgttcgctgctgttctcgcagaaatccgcgttcggagtgtaccgcagtgaggtgctggccagaaccggcataatctccttcgcggtgattccctcacgtgaatgctccgaaagcgatccatgggccgtggtgatggttggccggaacctgccgatagagtcctttgtccggttgaacggcgaggagtaccgacgggattcattgacggggctgctcaaccgcaacgctttcgacgatgatgtggaattcatccaagccacccatgacaagccgttgacggtgatgtacatagatctgattggcctgcatgagatcaataatcatttgggtcatgccagaggcgacgtggtgctgtgcgagcttgcggatgcggcgcgcgcctatttcggcgacgataatatctaccgcatcggtggcgacgagttcgtgatcatcagtttcgcccattcgatggcgcagagcgcccgacagatgggatatatgcgtcaggagctgcttgatcacggttgcgagctgtccgtgggcatggccgaatccgatgacggcgaggatattccggatctggtcaaccaggcggaaaacgagatgcgcaaagacaagaagcgctactacgccagcggcagcggcaaaaggcagttgcgcacgttgaacaagcagcttgaggacatcctggtacgcaacaaagacatggaatcgttgctgcagcatttgaatacacggtattcgatcgcttatgtggtcaatctgcgtgccgatacgcaacggccggtcgtggttcccggctatgtgcaaaaaatgcttgacaaacatggcggttccttccacgagatgctgctcgactattgcgacaaattggtggcgccggcctaccgggacggcttccgcatgctgttcgactacgattacgtccgcgaccggatatgcagggaaggcgctatacggtacgcctacgtcagaaacgacggcgaacggttcctgattacgattttccccgacacccattccgtggacgaggtcatgtgggtgttcgccaaagaagacacgtcgtccgaagaataggatttcgggcatcggacggtatgctgtccggttttgccggtgttgtaggatattgacgaaaaaactgtgtgtcgtgggtgcttcctcgcatggaaaagggcttatgatgaaaccgttggccgcggcgatggatgccgtggtcttcgcttgaacacacagtcgcttaaaggagagcactatggtctatcgcatgattttcaaccagaccgcgtatttcggccgcggagccatcaaggagattccgggcgtcgccaggtcccatggcttcaccaaggcgttcatcgtcaccgatccggtgctgctggagaccggcaccgtcaagaaggtcaccgacgttcttgacgaggcgggcatgccgtatgaggtgttcgacaacgtcaagccgaatccgccggtcgaatgcatccaggatggcgtcgccaagttcgcagcctccggagccgacttcctgatcggcctgggaggtggttccccgcaggatacctgcaagggcatcggcatcgtgactgccaatccggaattcgccgacgtgctgtcccttgaaggcgtggccgacaccaagaacccgtccgtgccgattttcggtgtgccgaccaccgctggcaccgcatccgaaacgaccatcaactatgtgatcaccgacacggccaacaagcgtaagttcgtggccgtcgacccgcacgacatcccaatcgtcgccttcgtggatccggacctgaccgactccatgccgcgcggcctcaaggtggccaccggactcgacgccctgacccacgccatcgaaggctatatcacaccgggcgcgtggagcctgtccgactgcctgtccatgcagaccatccgcatgatcgccaagaacctcgccaagagcgccgatggagacattccggccggcgaacagatggcctacgcctcctacatcaccggcatggcctactccaacgtcggcctcggtctggtgcacggcatggcccacccgctgggcggccgcctcggcgtggcgcacggtgtggccaacggcatcctgctggccccggtcatggaatacaacaaggactacaccggcgagaagtaccgtgacattgccgacgccttcggtatcgccgacgcctacaccggcgacatcgaaaccgtgcgtgaagaggccgtccaggcggtgcacaagctcaccgtggatctgaagaacccgaccaagatctccgaagttggcgccaccgaagccgacctggagccgctggcccatgacgccttccacgacgtgtgcacgccgggcaacccgcgccaggccacccaggaagacatcctcgccatctacaagagcctgatgtaggtccgactgcggtaggcgcaatcgcaaaaccgcaatcgtaaaaacaaaacggacggcatcgatcgcatggtcggtgccgtccgttcgctatccgcggaaaatacgccgcgaataatcgctatacctaatcgctattcctcgtgcttctcgctccactcctcatcagtgggagtgtcgtcatacagctcatggccttcctgttcggccaattccatctgctcgttgatccacgcggcctcggccggattgatatcagcggtgttcaacaccttctgccacaccggatacagcagatgcatcacaggatataacgcggtgatgaggatttccggcttgtgcttgcggtaatgctgcggatgcgcgttgaacgtgttcttgaaacggcgcatatagttgaggaacgatgccggagacgtgtccatacgacgtgcgctgatgcccgcgatcatccgcggacaatacacggtcttgagatccttgcccaacagatgcagcgagatgtcgatgtcctcatgcatcacatccgccttgtcttggcagacctcgtcggcgatttcgcgccaggcggtggcgcgcagggccatgttggaaccgaacagcagaggttgcccatcatcggccctataaatacgtttgcgggtggaattgtccccgcgaagcccgaaatgacggctcggcaaatcgtaatacatcaccggaccggtggcgcccatcgcatccggatcctcggtgaaaatgccggacaccacctccacccagtccgggcggatcatgcagtcggcatcgaaacggccaagaatatcgccggtggcatgattcaaaccataatcacgcgttggaatcagaccctgctcatcatcctgatgcagcagcttcaccggcgcttccggatggtccttcatgaactgctccaccacggcaacggtcgaatcagtggaacggttatcgacgacaatcacctcatgaggcatcacggtctgccgggtggcgttgagcaggcaatcgttgatacgctcctgttcattccaggcggggatgacaattgaaacgttcagcatggtttcaagaataggttccagcccgtacacggtgcctgtctacaataaggagccatgagcgaacgcgaacagcatatggatacggacaagaggacgggaacgtccggacagtgcggcaataccgacgaaatgcgttgggatctcggcacgctgttccctgcgaaaggcgatccacgcagacctccggaatggctgggtcgcgcgctgctgtacatcgccatcgccatcgtgctgctctccttctgctggcgcagttggggcaaaatcgaatacctcatcatcgacgtcgtcatctcgctgttcctggcgctcgccgtggagccggtggtgattccgctggtcaagcatggctggaagcgttcgttcgcttcgattttcgcgttgctgatgttgggtgtcctgctttgcgtgatgttcggtctgttcggcaatctgttcgtgcagcaggtcatcgctttgtgcaacggtctgccggccctctaccagcagatctgcgatttcgtggcgcaatacacggatttcaagcttcctgagatcaacagtctcggcggtgagattctgaagaacatccagacctcgtgggtcacggatttcgcgggcaccgccatcagcacggtgtccggattcttcagcttcctgctgaacctcatgacggtgatcatgaccacgttctacatttcggcggccggcccgaagctgcgccgcgcggcctgccagtggatggctccctccgcgcagcgccggttcctgttcgtctggaccgtcagccagacgcagatctcatcgttcctgttctcacgtgccatcctcgccgtgctcaacgcgttcttcacctcgatctgcctgatggcgttgcacgtgccgtattggatgccgttggcgttgttctgcggcgtcgtatcgcagttcatcccgatgctcggcacgtacatcggcggcgcgttgccggtgctgttcgcctggggcagctgtggtttgtggcaggcgatcgccgtggtggcgttcatctgcgtctaccagcagatcgaaaacctgatcttcgcgccgaagatctcccgccgcaccatggacgtcaacgatgcggtcgccttccttgccgtcctggccttcggctcgctgttcggcgcgatcggcgcgttcctggcgctgcctatcgtcgcctcgatccagacgatcgcccgcacctacaccaagcggtacgatctggtcgattcgccgctgatggacgatccggttccggacaagaagtcgaagctggtggaaggcgccgaagtcatcagcgagcacctgcacgccgtgccgcgcgccgtgcaggggtcgagcgcgcatgtgccgattcccgacgacgtgcgcttcctgcaggagcaggcgtacaatatcactcggtccgacgagaccggggatgccgacgaatcgcagaccgtcgccattccgaagcacgtgttggacggggtcgatcgcaagccgctgcggggaaccgcggaagcggacggagcgcagacggaagccggaccgcaggtagcggacgggtcgcaatcgcagggaacggatgacaatccgagaagtaggtggcgttaatggtattgctgagcgtacttgatgtcgtgctggtggttttgggcggcgccggcatgctctaccaagcggtctgcatcgtcatctcgctgttcgccaagccgatcaagttccccgaagcgccgatgaacaaacggtacgcggtgctgatttccgcgcgaaacgaagcgaacgtcatcggcaacctcatcgactgcctgcattcgcaaacctatccgagcgagctcatcgacatctggctggtggccgacaactgcaccgacaacaccgctgaagtggcccgaaacatgggatgccacgtcatcgaacgattcaacaaggagcaggtcggcaaaggctacgcgctgacctatctgctcgaccagatgaacgagtcgggcgcatccgacccgtatgacgcctttttcgtgttcgatgccgacaacaaactcgacaagcactacatcgaggaaatgaacaagggcttccaagccggtttcaaaatcctcaccagctaccgcaattccgtgaacctgtccgacaattgggtgtcgtccggttccgcgttgtggttcatccgcgaatcgcgcttcgtttccgcctcccgcatgtggctcggcaacagctgccacgtgggcggcaccggcttcatgttctcccaggagatcatgcgtcgcaacaacggctggaaattccacctactcaccgaggatctggaattcaccatggacagcgtgctgcacggcgaccgcatcggctactgcggcaccgccatcctgtacgacgagcagccggtcaccttcgcgcaaagctggcgtcaacgcctgcgttggagcaagggcttcctgcaggtgttccgctattacggaccggcgttgatcaagcgcgcggtcagggaacgtgatttctccgccgtcgatttcacgctgctgctgtgcccgttcaccgtgctcggcatcgcacgcgtgctgttgggcatgctgttcgccgcctgcggtttcgtgacatggcaaagccagctgaattcgctgaccggctggacatccggcattgtgatatcggtgatcggcatgatgggactcgccgcattgaccatcgtggcggaacgcgatcacgtgggcgccaccaacaaggagctgctcgcctacgtgctggccttcccgatctacatgctgagctatgtgccgatttcgttccaggcggtgttcgccaagtccgaatggaagccgatcgagcataagggctgaggcttgcccgcggcggtgtgaacggtcatgagatgtttcgtggcgatccatacggtgcggatggtgaaaagatgacgaagagagggtgtggtttggctatggatgacgctggcgattaccgctatacgcgacgacgccgagcgatcacggtggcggtttccgtcgtggccaccgtcgcactgtgcgtcggctatgcagtggccgacgtgtgcgatgtcgcaccgggcgtcctcacattgcgccatgtcgaacattcgacggtcgccgctgccggccgttcgatcgaggcggccgacgtgatcgccgacatcgacgcttccaagaccatcgatccggccgctgcgcgcgcgctgaccgacgcgttccgagcctcagccgccggcttcggcggcgaattctccatcgccatcgccgacgcgtcgggcaacgtggccgcggaaaacaacatcgacgtgccccgcacgccagcatccaccatgaaaacgttgacggcgtatgcggccgccgtcgaactcgacatgggcaagaccctggacacgcagacctatctggaacagtcccaggacggcaccgcgcgtctggtgctcaaaggcaacggcgacatgctgttgggagccggagcgtccgacgcgaaccacatcaacggacgtgccggattgggcacgcttgccgggcggaccgcacaggcgttgcggcagcgtggcatcacctccgtgacattggcttatgacgacacactgttcggcaacgaccgctggccgcaaggcatcgccgaactcgacacggaccacctgtactacgccccgacagcttccatggccgtggacggcggcaggaattggaacgggacaggtccggccaatcctgatgtgttctcggcgtatccggcattgagcatgcagccggcgcgtgacacggcgctggtgttccagcagcggctggccgaacagggcatcacggttcagggatttgtatcgcaaggcacggttgcgggggcatcccatccgcttgcctccgtgcgttcggcgtcgttgaacgagattatggcgttcaccatgcggcattccgacaattcgctcgccgaggaattcggcaggctgctggcgttgcaggtcggcgcggacaattcgccggctggcgcggtgcaggctgtgaaaagcgtgctggagcgcaaaggcatcactacgaccgggctcgacatgcgcaattgttcgggacttacggaggattcgaaactgacggcgcgcaccctgctcgaagtgcaactgcgcaatctggctgcgggatcgggggcggccgcagccgaaggaatgtccgtcatgggcttcgtcggcaccgctgagagccgtctgaacgatgctgacgaagcggggctgatccgtgtgaaaaccggcagtctgggcgacgtgacctccatgaccggcaatgtgtcgcggttgaacggcggagcgttgaccttcgcggtgatcgtcaacaatcccaccgatttcgcggcggcgaaggcggccatcgacacattcgtggccggtctgccgaagctgtgaacggccacgtgtgaatcttcccagcggatattcagcatatagccagaaacacgtcattcgcatgtgccaagatggtgggcatgcgaatcgctgacgtacaagaagacattgatcacgagctgatcagcaaagaagagatctccgacatcatcaaccgtgccgcggcacaagccagtgaagactatcgtggcaagaacccgctgctggtctgcgtgctcaagggggccgtgaacacgcttgcggcgttttcccaggccatgagcattccggtccaaatggatttcatgagcctgtcgagctacggttccggcacggagtcgagcggcaagatcacggttcgtcaggatctgtccacggatgtgcgaggacgccatgtgctgatcgtcgaggacatcatcgattcgggcatcaccctggcttggctggtcgacgagctcaagcgccgtggagcggcttccgtggaaatttttgcgcttctggagaagccggcacgtcgcaaggtcaatgttgatgtgaaatacaagggacgtgagattcccgatgaattcgtggtcggtttcggcttggattacgacgagtactaccgcaacctcgattcaatcgcggtgctgaagccgtcagtctatgaaggaggtcaggcatgagtttccctggtccgaaccagccgccaagcaatggcggcggcaacaagcccaacgggggcaataacccgttcaccaatccgtttagccgcaacaatgacggcaagaacggtggcagcggggcgaacggcaacaagtccaacggcccccgtccgttctggcagtcgccgtggctgtgggttgtggtcgtggcattgcttgccgtgaccatgttccagcttttcgccggtgcgggctcgcaaaccatcgacaccaaggatggcatgcaaatcctcaacggcaacaccgtagagtacgcgacgatcgtggacaacacccagcaggtcaagctcaagctgtcgagcgattactccgccaccgacccggacaccggacgtacgaagaactacggcaagaacgtgcagttctactacacgtatgcgcagtccgcggccgtggtcaaggccgtgcagaaggccgatccggccaagggctggaccgcgtccatgcagcagaccagcatttggacctacctgctcacctcgctgttgccgttcctgatcatcttcggcctgttctggttcctgatgagccgtatgggcggtgccgccggcggcatgttcggcatgggcggcaagaagaacagcggcaaactgctcgacggccagaccccgaccaccaagttctccgacgtggccggcgaagacgctgccgtgcaggaggtcgaggaaatcaaggacttcctcaaggacccgtcccgttacaaggctttgggcgcccgcattccgcgcggcgtgctgctgtacggccctccaggcaccggtaagacgctgctggcgcgcgccatcgcaggcgaggccggcgtgccgttctactccatggccggctccgacttcgtggagatgttcgtgggccttggcgcctcccgtgtgcgtgacctgttcgatgaggccaagaagaacgctccggccatcatcttcatcgatgagattgacgctgtcggccgcaagcgtggcggttccggcatgagcggtggccacgacgaacgcgagcagacgctgaaccagctgctcgtcgagatggacggcttcgacaacgatacgaacctcatcatcatcgctgcgaccaaccgtccggatgtgctcgatccggcattgctgcgcccgggtcgtttcgaccgtcaggtggccgtcgaagcacctgatttggaaggccgcgaggcgattctgaaggtacacgccaagggcaagccgttcgtgccggacgtcgacctgcatatgatcgccgtgcgcacgccgggcttcaccggcgccgaccttgccaacgtgttgaacgaagccgcgttgctgtgcgcccgtgccggcgcccagctcatcgacaaccgcgccatcgacgaggccatcgaccgtgttcaggccggtccgaagcgtcgttccaagggcatggctctcgacgagctgcgcaacaccgcatatcacgagggtggccatgcgctggtcgcggccgccatgaacgacaccgatccggtgaccaaggtgacgattctgccgcgcggccgtgcactgggctacaccgcggtcatgccaaccgaggaccgttactccatgtcccgcaaccagctgctcgatcagatggcgtacgccatgggcggccgtaccgccgaagaggtcgtgttccacgacccgaccaccggtgcttccaacgatatcgaaaaggccacgaacatcgcgcgtcagatggtgctcgactacggcttctccgagaagcttggcgccatcaagtggtccgatgacgagcaaagcgatctcggcgcgctcacccacaagtactccgcgcacaccgccgaaatcatcgacgaggaagtgctcaagcttgtggagaccgcgcataccgaagcatggaacgtcatcaacgagaaccgcgacatcctcgacgagctggtacgtcagctgctcgtcaaggaaacgctcaacgagaaggagcttgccgccatcttcgccaacatcaagaaggcgccgaagcgcgaggtctggttgagcgacgagaagcgtccggactccgacattccgccggtcccgattcccgacaagctgaagcaaagcgcaggattgaccaactgatgagcgataccgatttcgataccctcttcgacgacaaggcccgtgccgctcatgcggccgggcctgtcggctatgacgaggaaggcgtgcgccaggccgtgcgcctgttcttgaagtccatcggcgaggatccggaccgtgaaggtctgctggacacgccggaccgtatcgggcgcgcgtgcaaggagctgttcgccggcctcggacacgggccagaggaagttctgaaaacccgtttcaaggtggacaccgacgaaatggtcctcgtacgcgacatcgaactgttctccgtctgcgagcatcatctgctgccgttccatggcgtggcccacgtcggctacatcccgcagaacggccaagtggcgggcttaagcaaactggcacggttggtggaactgtacgcacgccgtccgcaggtgcaggagcggctcacccagcaggtggccgacgcgttgatggaaggcatcgacgcgcgtggcgtgatcgtggtcaccgaatgcgaccacatgtgcatggccatgcgtggcgtcaagaaggcgcagtcccgtaccgtcacctcggcggtgcgaggatgcatgcgcgacgcggccacgcggaccgaggcgatgagcctgattctgtcgaaccattcgtaagtgcgctttaccgggcggaatcggacagaaccgaacggaagaacggaatgaatgaaggaagaaaaccgatggcgattgatatgaaggcgattcatgatagccagcgcacgttggtgatgggcgtgctcaacatcacggaggattccttctccgacggcggcctctggcttgctccggaggcggccaaagcccatggcgaggcgatgatgaaagccggtgccgacatcatcgacatcggagcggaatccacccgtccgggagccaaacgcgtcagcgaagccgacgagaaggcccgtgtgctgggcgctgtggacgcgctgattcccgaaggggcggtgctgtccatcgacaccacgcgcgcttcggtggcgttggccgcgctcgaacatggcgcgcagatcatcaacgacgtgtccggcggccagttggaccgcgaactgccgcatgtggtggccgaccattccgactgcctgtacatcgtgcagcattggcgtggctggcttgccggcgccgcgggcaatgtgccggacgccgacacctcccgctacgagcatggcgtggtgaatgacgtgtatgacgagctgatgcgtcaggtggatgcggtgcttgaagccggggtgcaggccgaacaggtcatcatcgacccgggcctgggcttctccaagccgggcgtggagcataacctgccgattctggcggcgcttgaccggttcaacgcggctggctatccggtgctgatcggcgcgtcccgcaaacgtttcgtcggctcgctgcttgccggcgccggtgtgaccgagccggacatggcctcaaaagacaacgccaccgcggccatcagcgccctgtgcgcggaacatggcgtgtgggccgtgcgcgtgcatgacgtggcgaaaagccgcgacgcggtcgccgtcggcaacgcatggcgcgagtatgcgaacgcgtgaccgtgcgaatcgcagatagtcacaacatcgcaatcgcggaaataataggaatacggaacgtaggaacggcaaaggaaggctggtatggatcagattcgactgacgggaatccgcgcgacgggcaaacatggcgtgctcgacttcgagcatgagcgggcccagaccttcgtggtggacgccacgctgttcctcgacctcgctgccgccggccgttccgacgatctgaacgacaccgtcgactatggtgcgatcgccaaaggcatcgtggccatcatcgaaggcgaacacgtcgatttgattgaaaagctggccaatcgtatcgtcggcatgattctcggctttccggccgtgtgccgcacgcaggtcaccgtgcataagccgaatgcgccgatcaccgtgccgttcgacgatgtcagcgtgaccgtggaacgttcccgtgaaacagttgacagtccatcgcgtgagcggtcgtcggaacatgggcaggtgcatcatgccatcatcgccatgggaggcaatcagggcgatgtgaccgccaccttgcgtgacgccgttcggtgcattgatgggcttccctccacgcaggtgacgggggtgtcgccgctctatcggaccgacgcatggggcatgccggaaggtactgcggaattccgcaatgcggtcgtgtccgtggataccaggctttcggccgccgaactgctggccggtttgcagcgcatcgaagcctcgcatggtcgcgtgcgcaccgaccattggacgtcgcgcacgctcgatttggacatcatcgactttgacgggcaggaaagcgccgaccccgacctgacgttgccgcatccgcgcgcatggcagcgggctttcgtattggggccgtggcttgcgcttgaaccggacgcagaactcgggggagcgcacgccggttccgtggcgcaactgctgcacgaaacgtccgaccgcgaccatatcgatgagatcgcggacgattggatggttgccggagctcaggatcccatagttcgcgattccgacattgggacgtctgcagatgacgttgatgcgattgacgatgccgattctgttgaatccattgattccattgaacttccggaaggtacggcggcctccaaagcagccgctgcggccgcggcgaaaccgggaccggcatcccgtcgagcggtcatttccctggatagcgtttcaactgatgcggaacaccagttccgtcaggcgatcgtggccatcgacgcgcttcccggcaaccaggtggaaggtatttcgccgctgtaccatgtcagccaggtcgacgactatccggacaaaatggccgccgtcatgcagatttccacgcgcatggacgcgcgtgagcttatcggtgcgttggaatcggtgtcatcctccatttcggatgacctcgacctcgaccttgtggacatggaaggcgtggtccgcaacgaacctgattgcatggtgccgtggccgtccgcacgtgagcatgcggccgtgctcgccccatggttcgacatggatccggacgcgaaactcggcagggatccggtcgcgttcctgctggcgatggctccggacgccgcgcaagtgggcatgctgaccgacaattggattatcggagacacgctatgagagcacgcagaaccccttggtggtcattcgtccttgcggccgcgcttggcgtgctggccggcatgggattgtcgaaatacggcgagatttcaggcctgccgttggttggcgcaccctggatcgtgccggtggtgctggccgtgttgggcggtgtggtgctgtacatggctctgcagattcataaatacacgaccaaagatcccgtcaaacgcgcgcagctcaagccattggacccgcagaaggcgttcggcacgctggtggcctgcaaagcgctcggacttgcgggtgcggcgttggccggctggtacggtgggcagatcatcatgagtctgccgcatggtgaggcggaattctatagccaagccatcatcgaatgcgtggtggcctgcgtggtatgcgtcgccgacatgatcgtcggcatcgtgggggagtggctgtgccgcatcccgcctatcgacgggccggaaagtccggccgtgaaaaaggccgcacagcgcaatcgctatgcggccgccgccacgaaggcgtctacaaaatcggctacgaatcctgccacgaaatcgaaagtctgaacgtcagaccttctttaactccgtctcagtccttcttcggcacgcggaacatcgcttcctgcgccatgcaggccaccagctcgccatcctgtgtgtagaccttcgcttggcccaagccgcgtccgtgcgccgcggtcggcgtgtcttgcacgtacagatgccactggttgatgtcgatgtcgcggtaccaccacatcgaatggtcgatggacgcatacgaaatgcccggcgtggcgatgcttaagccagcacggcgcagaatcggctccagcatgatctggtcgcagcccatcgccagcatcgcacgatgcatgacctgcggcacgtccaccttgccgtcggccttcatccacaccatctgcttgccggaatcctcgctggcgctcttcttgtcggcgccaagcatgatggtgcgcgtcacatggcgaatatcgaacggcgacttctccgcataatacttggcgaacggcgactgttccgcatacggctccatcagttgcttcgcactggtcaggctgtcgggatcgggaatgttctcaggcatcgggtcggcgaattcgatgccttcctggtcatgttcctggaagctggcgattgccgtcaaaatcgagccctgcgcctgcgtgacattcacgcgacgggcggagaaggaacgtccgtcacgcagattttccacgtcgaacagcagatcctgacggatatcgccggccgaaatgaaatagccgtggatggaattcggcagacgggatggagcgacggttttcgacgcggccatcagcgactgcgcgatgacctgtccgccgtagactcggccagtggggaagtacaggctttcgccgttgatatacgtatggttgcgatagtttgagggcgtgcccagctggagcacctttgccagtcgttgcagcggcgtcatgtctgtctgcgtcatgatggcctcgattccttccgcgtgtggatagctctttatgctggcatcgagtctatccatacgtagtaaatttcgtcggattgttttgtaacgagtacgtgagaagaatgaacggttggttagcggcaaacggttgacgtatggcaaagcgccaccgctcgtaatgaagggtggcgctttgctgaaatctgcgcttaacgcgacttgattggatctgtctgcctttagcgggtcagcttgcggtgcaggcggtgcgggcgggccgcatcctcgccgagacgggcgatgcggttctcctgataggcctggaagttgccttcgaaccagtaccagttggccggattctcgtcggtgccctcccatgcgaggatgtgcgtggccacacggtcgaggaaccaacggtcgtgggagatcaccacggcgcagcccgggaaggcgagcagcgcgttttcgagggattccagggtttcgacgtcaaggtcgttggtcggttcgtcgagcagcagcaggttgccgccctgcttcagggtcagcgccaggttcagacggttgcgttcgccgccggacagcacgcccaccagcttctgctggtcggaacccttgaagccgaaggacgccacgtaggcgcgggtcggcacttccacgccggccacctcgatgaagtcgagtccgtcggacacggcctcccacaggttcttgttcgggtcaaggccggcacggttctggtcgacgtagctgatcttcacggtgtcgccgatcttgagcgaaccggaggtcaacggctccaagccgacgatggtcttgaacagggtggacttgcctacgccgttcgggccgatcacgccgacgatgccgttacgcggcagggtgaagctcaagtcgtcgatgagcacgcggtcgccgaacgccttgtggatatgctcggcttccagaacggtggaacccagacgcgggccggccggaatctggatttcggagaagtcgagcttcttgttgttgcgtgcctcctgctccatctggtcgtaacgttccagacgggccttgttcttggcctgacgggccttcggcgaggaacgcacccagtcgagctcgctcttcaggcgcttggcgagcttggcgtccttggcgccctggatctccatacgcttggccttggtctccaggtaggtggagtagttgcccttgtatggatacaggtggccgcgatccacttcgcagatccattcggccacattgtccatgaagtaacgatcgtgggtgacggcgatgacggcgcccttgtactggtgcaggaactgctccagccacagaatcgattcggcatccaaatggttggtgggctcgtcgagcagcagcagatccggagcctcaagcaacagcttgcacagtgccacacgacggcgctcgccaccggagcacacgctcaccggcgtatccggatccgggcactgcagagcgtccatggcctgctcgagctgggagtcgagatcccaaccgttggccgcgtcgatatcgttctgcagcttgcccatttcttccatcagcgcgtcgaaatcggcgtccggattggccatttcctcgccaatctggttgaaacgcgccaccttttcggcgatcgggccgaatgccatcttgatgttctcgccgacggtcttggtgtcatccagcggcggttcctgctgcagaatgccgacggtgaaaccaggggtcaggtaggcttcgccgttggaaacggtgtcgaggccggccataatcttcagcagcgtggacttacccatgccgttcgggccgacgacgccgatcttcgcgcccggcaggaagctcagggtcacatcgtcaagaatcactcggtcgccgtaagccttgcgggccttgatcatctggtaaataaactcagccaatgttgtgttccatccttaagaaacgttggaattccagcgttttgcgtatgtcggtcgacggaaaatcgcacttgttcgccgtgctgtggcgcgttgccggcgcgactggttgcggacgaatcgcaagtctgctgcgaactcatcgaagccaagtgttttcggaccgtgtccatacgcaaagtaccatcgccgattatcccatatcccgtctacacagagtggcggttactcgtaggaggcatgggcgccattcgacgaagggcgatccggcatgttcgataatccgactttggcgaaaatcggcgaaacccatggcaagtcggtcgcctaggtgattctgcgctggctggtgcagcggaacatcgtggcgttgcccaagtccacgcatcgggaacgaatggaacagaacatcgatgtattcgacttcacgctgagtgatgaggagatggcggccgtcaccgcgctggataccaagaccagcctgttcttccgccatgataccccggaggccgtcgatatgttcgttggtttcatcaaggaacgcgcgggacgggaatgacgctgacatactgagaaaaaggaagtcccgatgttgccccccgtaggtgctgcggcggcgattttccttggtttttccgcgcttttcgagtacgagggtggtgggttggctgttttcggcgggcggctattgattggtgggcggcaggccggcgatcaaatgatcacgccatcgcagtggtcgatctcgtgttggatgatctgcgcggtgaaaccggtgaacgctgcgtggcgctcgcggaatttccgatccatataatccacttcgatgcgctggtatcggacggtgcggcgctcgccctggagcgagaggcaaccttccgccgtatcgaacgcgccgtcttcggcggtgatgtgtggattgaacatcacgaaaatgcggccgccgaaatcctcatccacaaaagcgatgatgcgcttgggaacgccgatcatattggccgccatgcccacgcaaccattgcgatgcgcgtccaacgtgtctttcaggtcctgtgccacggccagatcctcttcgttgttctcggctgcggcggacggctggctcaaaaatgggatggacgtcatgatctcacgctgcatgtgattcctctcgttggatgttgccggtctgccaatattgtagcgtcgcatggctgcgagacggacggctgggcgaacctgtccattccctgaccgttcgcgtcggcttcgggatgtgaggtacaacgtgtgcggcttggactggtgcaatatgcttggggtcatggaagacatgttgcaataccgcgaatatatggcgcaggctcttgaactggcccgcatgcggagcgtatggcgttcgactatgccgacgcgcacggcatcgatctgactggcgccacggtcatcgacacgcttgaaccctgctgccatgtcggatcgcagccggcgtgcactgacttgattctggcgcacggcatcgcacgcgtggtggtcggatcggtcgatccgaacccgattgtggcgggcaaaggccttcgcatccttgaggaagcgggcgtcgaagtggttcgcgacgtgatgcgggaggaatgcgacgccatcaatcgccatttcttccactacatcaccacgggaaagccgtacattgtggacggcagaaggcgtgcgggtgaatcggactctgagtatgcggtccgtcggcgcgaactatatgccacatatgcggcggtgcttgccggaactgaatcggacgttcctgacgagtctttcgcgcatttcaacggaccggtccaagccgtcggcgcagacgaagtggtgattggcggccacaggccgttactcctggaggccggcgcgctcgcctgcacggatccagacgaatggctgagtgagctgggcaagcgcaaaatcgacagcctcatcgtggaaagcgacgaagcattcgagcggttgtccatggcttgccaaaaagactgaagcgccattcgtgcgttgttggccgtgtatctcgcttatagatggcggattcgtctgcttgtccagtgctatctcgcttataggtggcggatgaattttgcgaagaggtcttagagggtgtaaatcataccctctaagaccttaatgacgtagaggcgccgccatctataagcgaaatagcatcgggcggctttccgattccgccatctataagcgagatacgtgagactgatatgtccagcacccagcaagcatagtggcgagcacatggtcgggcatggcgcgcatggcctcaggggactcaagcgcactcggatcgcaatccagcagcactaggtctgccgcatctccagcttgcaacgtcgtacgccccagggcggtggacgaagcgagagcggtttcgaaatccagacattgctcagactggaaaggctctcgatcggaactctccgtgccgaacaccgctgcggaaatggccagccacggatccaacggcgcgaccggcgcgtccgagcccataagcagtttggttccagacttgtgcaaactgttgaacgcgtagggaattccggcgggattgccccagaatcgtgtgatgacgtcacggtcgtccatggcgtgctgtggctggatgctcgcggcaagtcccaattgcgcaagacgtggaatgtcgcgttccttgagcatttgggcatgctcgatggagccgtgcgcgtgggtacgttccgcgcagtcgagcacgatggtgttcgcttcgtcgccgatggcatgacaggcgatgtcgaagccatgttcggcggcgagccgcatatacgattcgatttgctcgggggtgtagctcagcgtgccgtaggtttccggcgtaatgcccgaatacggtgtggagcagtaggcggatcgggtgttgagcgagccgtcggaaatcatcttcatcgcaccgacatggcccaagccatggcttccgggaagttcgtcgccggtatgccagccgtcgtcgatggcttgctgaagtcgttcggggtaaacgccggcttcgatgcgcaatccgtcaagcccctgcttgaagcggtcaatccacgtgtcgatgttctcggccatctcatagtcgcgcacgccgaccacgcctttgccggcggcgtcctgttccgcgttgcgcagcaatcgcatcagctcgtcagccgcaccggggcctttgtccagcttgcagtaagcgtcgaaccattcaagctcgccgacgagtcccgactcgcctacatgcacgccgagcttacgagccgcggctgaattcacccagccgcaatgcatgtctgcgcttgacagcgccacgggctggtcgcccgacaccgcgtcgatcgcagccaatgtcggttgggcatcatcggcccacagggagtgtctgaaccgcatgccgaccacgtactggtccgggtcgagcgtgccggattcgcggcgttcctccaagtgctcgcgtagcaggctcattgcctcatcggcgctgcgggcatcaatcagatcaagccgccccagcgtgtacgaccactgcgtgaagtgcgtgtgacaatcccacaagccgggaatgacccacgtttttgaagccttggctaccgacttttccgaagaccgtacatccgcgacccgcccttgctcaatcgtgatgtcgacagactcatcggaccccacgaaacacacattctcaatcacatacggttcgcccatacatcctcgattcaacaaaatgacctcattgccagccatagtatccttgcaatgcttgcgattgccgcgctcgtctcaatcggctatgcgcactttgaattcctccgctgggatacggttatccgcatcagaaaaagaagggcgcagttatccacttatccactgtttgccagaagccggtaggcagcgcggcgacatttcctctactttggcgctatggacaatggagcacaatattcggaaagcctcgcacggctgaggacaagaaccatcgaacaatgtctcgaagcgcagaggcgcaccggaaggcggctggtgttcgcgcttgataccgcactgagtttacaaggcatcgaactgcctcgctaccggcgcggagggcttttggctgatacgctgcacgcggtgattgaaagtaacggcgtgcgaacgatactgcaggggatttgttttgtgctttggtctggacctcagacgcatatgccgattcatcatggtcgattgcgatgcacggattccgtgaccacatgggccatgcatgccaatcggcttgaagatgaagaattggtggttttgggtgattcgatgatgcggcgtgatggacatatgaaaaaggccacactggaggagtttcggatatatgtcgatagcttgtccgatttgtccaactattcaggctccgacagattacgtgcggtgagaggagtgtcgaaaatgcgtagggctctcaggctgatgcgggagaatacagattcttcccaggaaacgagaagtcgaattgttctgttgcgttatggtttgccttgtccggaagtgaactatgccattcggctcaaaggctattctcatgtatttttcgcggacatggcttatccggatttgaaaatcatcattgaatacgacggcaggcatcatgcctcgcgatggttggctgacagtaaacgtcgggaagcgttggaggatgaaggatggctgtatatccaggtgacggcggaaaatctcagggatgaggattctcaaagggaattggcggaacgtgtggcgcagagggtgtcattgcgtttgggggagcctgtgcggctatgtgggcgaatgacgattgctcagatagccgatggtcggaggaagggcaaccgtctgtgaggcttgggcaagcccatatctcgcttatgaatggcggaatcgggctgcggcatgatgctatttcgcttatagatggcggatgaaatccacaaaaaggccttaagcggtatgaatattaccccctagggccttagcgattcaagaagactgccatctataagcgagatagcatcggtcgggtgaagaaatccgccatccataagcgagatggcggatttctgcggctcactgcacggcggcgagggcttggtcgaggtcggcgatgatgtcggccgtgttttcgatgccgcagctcaggcgcaccaggtcgatgccgacgccggcttcctcaagctgttcctcggtgagctggcgatgcgtggtgccggccggatacagcgtgcagctgcgcgcatcggccacatgcgtggcgatggacaccatcttcagatggtcgaggaacgcggagaccttctcgcggccgcccggcacgccgaaggagatcacaccgcaggtgccgttcggcatgtacttctccgccagcgcatggtacttgtccgtttcgaggcccgggaagctcacccagctgacgcgcggatcggcgtcgagccacttggccacggccagtgcgttcgcgcagtggcgctccatgcgcacgccgagggattccagatgcatgcccatgatccacgaattgattggcgccggagtggagccgaagtcgcgcatgagctgcgcggtggccttggtgatgtatgcggccttgccgaattccttcgcgtaggtgacgccatggtaggagtcgtccggagtggtgaggcccgggaatttctccgcatgggccatccagtcgaaattgccggagtcgacaatcgcgccgcccacgcaggatccgtggccgtccatgtacttggtggtggcgtgcgtgacgatgtccacgccgtactggaacggacggcagttgatcggcgtcgggaaggtgttgtcgacgatcagtggcacgccgtgacgatgcgctgcgttcgcgaacttctcgaagtcgagcacgataagcgccggattggagatggactcgccgaacacggccttggtgttcggctggaacgcggcctcaagttcctcttcggtgcagtccgggctgacgaatgtgcattcgacgcccatcttgcgcatggtcacgttgatgaggttgaacgtgccgccgtagatggcggaggaggcgacgatgtggtcgccgttgttgcagatgttgaacagcgcgaagaagttcgccgcctggccggatgaggtgagcatcgctgcggcgccgccttccagctcgcagatcttcgcggctacggtgtcgttggtcggattctgcaggcgggtgtagaagtatccggattcggacaggtcgaacaagcggctcatctgttcgctcgactggtatttgaaggtcgtggcctggatgattgggggagtgcgggattctccattgcccggctgatagcctccctgcacgcagatggtgtcgacgttttcgctcatatgttccttctttcgattccgcgcttccgtgcgccgcgcaggtgttgcgccgcgatgcgaacaaacaaacacactgtatcactgcattgataaatggcttgattccaatggaaacgccgtatagtttaacgaattgacaaacttaggtaattcaatttattatgtagaccaagacgggcggaaagcccgctgcgaaataaagctttacgtaagtaaaccaagcaaaggagcattccatgggtctgtgggatatcgataagattccgtacgtcggtcgcgaaaaggggccgcaggagggtcttgccttccattactacgacgccgacaaggttgttgccggcaagaagatgaaggactggctgcgcttcggcgtcgcatggtggcacaccttcgaccaggagctggtcgacccgttcggcaccggcaccgcccagcgcccgtggtacggcaagtattccgatccggaggacgaggctctggccaaggtcgactacgccttcgagttcttccagaagctcggcgtcgagtacttctgcttccatgatcgcgacatcgctccggaaggcgacaccctgcgcgagaccgacaagaacctggacaaggtcgtcgacaagatcgaagagaacatgaagtccaccggcatcaagctgctgtggaacacctcctccctgttcaccaacccgcgcttcgtctccggcgcctccacctccccgttcgccgacatctacgcgtacgccggcggccagctgaagcactccctggagatcgccaagcgccttggtgccgagaactacgtgttctggggcggccgtgaaggctacgagaacctgtggaacacccagatgaagcgcgagcaggagcacatggccaagttcttccacatgtgccatgactacgcgaaggaaatcggcctggacgcccagttcctgatcgagccgaaggccaaggaaccgacgatgttccagtacgacttcgatgccgccaccgccatcaacttcctgcgcacctatgatctgatggacgtcttcaagctgaacctggaaggcaaccacgccaacctggccggccacacctaccagcacgagatccgcaccgcccgcgaggccggcgtgctcggctccctggacgccaaccagggcgacaagctcatcggctgggatatggatgagttcccgaccgacctgtacgagacctccaccgtcatgtgggaagtcctcgccgaaggccagatcggccctcacggcggcctgaacttcgatgccaagccgcgccgcacctccttcgccgccgaggatctgttccgctcccacatcgcaggtatggatgcattcgctgcaggcctcctggtcgcagccaagatgcacgaggacaaggtcatcgagaacctgcaggccgagcgctacagctccttcgattccggcatcggcgcaaccgtcgagaacggcaccgcctccctggcctccctcgaggagtatgctctggatatcccgcagtccaagctcatcgaggccaccaagtccgatcacctcgagtccgtcaaggccacgatcaacaactacatgatcgacgccctggccgaggcgtgagccgaaaactcgctagggttttaggtagcctcgggcgaagtccgagacggtagtcgagggcgagcaatgactgggcgcgcgtagcgttccggaattgcaggaccgaggcatgggcgcagtaaggagtttccgttaggactcctgattcatcgctggatcaaacagtggggctcgactgtgacagagccggatgtggtgtgccgaagcgtcggtgttccggcacaccactcacttttctttccttcctccttcctcaaatttccttcgcacgcaagtcgtttgccggctagatcgccggtgagcggcttgtttgcgttgctagaccaagcgaaaatttcgattattcgcaataatgtgatgtatccaaacgttcccgaatgaggcgtacttatgaccacaacgattaccatcgccaatcccattcttcacggaatgcatcctgatccgagttggatttgggatgatgatcttcggcaaatcgtgcttgtgacctccaccttcgaactggttccaggcttgcctatttacgtttccagggatatggcccactggaaacacgtgtcggatgccatagatgaggagttggcaagacgtttgctcattcctttcgtggatgactcgggtggcgtctatgcgccgacgctgcgtaggattcgtggcaaatacgtgattgcctgcaccatcgctcgcatcaatggacgcaaagccatcgcggaaggatgctcccaggccgaattggatgcggcccaggcggcggaaggcaacttcgttcttgagtcggactcgatcgacggaccttggcgtgggccgttctggatcgagggcgccgaaggcatcgatccagacatattcgaggatgaggacggcaatgtgtactggacccagacccgtcctgcggtcaatccgcaatgggaaggccagaccgaggtctggacccaacgcattaatccggagacttggacttttgtcgatgacggtcttcctgcgggatcgggcaagacggtaatatggcgcggatacggtatggaatcggtgtgggctgaggcgccgcatctctatcgcgtgggtgattatgtgtatctgatgaccgctgaggggggcaccagtttcgaacatagcgaaatggccatgcgcatctatgcgccgcatggactgcttcgggcgttcgaagcttacgaacgggaagtatccgaattgggtgagtgcattccgcaggttcgtgacggggaacgctgctatcttggcaccgcaatccgtgccttccacgcggataagaagaatccgattctcacccaccgacatctgggtttgtcggaaccgctgcaatgcgtgggacatgcggacctgttgcttcatccggaactgggatggtggctggtgtgtctcggcgtgagagagacacggggaaagcatgacggcgaattattgagctacttgggaagggagagctttgtcgctccggtatcctgggaacataatccggccgattggaagctggacggcaacggtgcatcatatacgcatgagggtgaccccggatggccagtgacttgcgctggtcttggccgcttggccgacgagatcacggttactactgaagacgatggcatcaccatcgagcctagggtgaaatcctcgctcgccggtgacgtggaacctgcgctggtggatgtggctgatggctcgacgaacgatgtggtggtgcgcgacgagcgtgatgtcagctaccgcagaatagcgaaactgccgacgctcatgccgattcccatgtccggttctttagtgatccggcagaattccacgcattacgcggtgttttcgatgcatggcacggatgtgcgctacgagacggtgaatggagatgattcgcaagccggttccgttgccgccctgcaggctgatggcacacgtccggcggtgcttttcgatgacaaccgcttgtcggtcatcgtgactggcatgcatggtttggttgattctgcgacgttcgtgcgtcaggggcaggtcctgctgagtgtcgatgctcgtttcctcagcaccgaatgggccggtgggttcgtcggttgcatggccggcttcatggcatagtttctacggaatttcaggatggttcactgctggtgttccgacgggccgtcttagaacgagttgaaaacgggtcgaaaggctaggagtgctgtattctccctccggttgtgcctgtgaggtttgccccgctgattaaccctcgagttgctgtgtgctgttgcgtaccactagcgatgtcggcatgatgatgtgcggttggatcacgtcgtcggtggacagcgcctcgatcagcatgcgtacggcggcccttgccatgtcttggagcggctgccgtacggtggtcagcgccgggccaaggaatgcggcagtctgcacatcgtcgaatccgaccacggatagatcctccggaatacgtaaccccaattgccttgccgcctcgtagacgcccatggcctgcagatcgctgccggcgaagattgcggtcggacgatttggtcgtttcaacagggagatggactgtgcgtaaccgccggaagtggtgaaatcgccttcggtgataagttcgggatcggtttcgattccatgttccgcaagcgctgatgtatatccgtccagacgtgctttggaacacatcatttcctccggtccggtgatgatgcctatgcgggtatgtccgagtgcgagcagatgcctggtggcgattacgcctccggtccagttgtccgcttgcaccgacagcgtgtctggatctggattaccgaatggatcgaacaagacgaagggaatacctctggaatgcagcttgttccgttcgatacgtgtcagactggagaagacaagaatggcgccatctgtctgccgacgcagcatgttgtcaatccaggatgagtccgggtgctggcgattgccgccttcggtggtgatgacgttcaaatcatgcaacttggcttcgcgaatggcgccacggagtacttcaagggcccaaacattatcgaaatcttggaacacgatttcgataattcgttggcttttcgtgcttgtcgctttacgggaatacccataccgtttcaacaccgcgttgatggtttgccgcgtctcttcggaaacgtcggctctgccgttgagcgccttggatacggtggaaagggaataaccggtctctttagctatgtcagagagtcgtaccgtagctttttttgccgtattgcgcatgagtcactccttcttcattttcatcatatccgaaaatgcgaacgaaagtttcggtttacgcttttcgaaactttcgatatgttggcaatgcttaaaaacgttgtaaaatcaacgaaaaatagttagttttctgattttacaaaaaacttgactttgtgtgatttgtttcggtagtctgtaggtacaacgaaaacggaatggaaattttcgaagggagtcaaaggctgattctctgtctgccagggagctgcggcagcattcgttgcggtcatgcttcccgattcggcccattcgagagaaatcgttcctgtcgttgccatcattttgtcgatgatgatttggtcaataaggagaagacaatgaagttcaaaaccattgcagctgccactcttgcggtggcgaccatgttgggcatgggtgcctgcggctccagcactggtgccaaagacgataagaccattacgttctggcataacgcaacagctggtgacggcaagcagtattgggaggatatggccaaagcgttcgagaagaagaccggtgtcaaggtccagatccaagccatccaaaacgaggatttcgaaggcaagctgaccaccgctatgcaggatcccgcctccggcccggatgtgtacatgacccttggtggagccaagaccaaggacatgattgacgccggacaggccatggacctcactgataagatcagtgacaccgtcaagaagcagatgtcttctgcgctggagtccatgtcctatgacggcaaggtctatggtgttccagtcactgtgcagcctggtggcatctggtattccaaggatctgttcaagcaggctggcatcgatgccgcgccgaccaccttcagcgagctgaagaccgatgtacagaagcttcgcagcgctggcatcgatccgatcgcactcggcggcaaggatgcttggccggtcggtcactggtactactggttgtccatgcgcgaatgctctccgaaggcctacgccaagggcgtcaatgacaaggacttctccgactcctgctggaccaaggccggagatgatctgaaggatttgttggatgcgaatgcttttaacgaaggattcctcaccacgacggcccagcagggcgccagctcatccgcaggtctgctggccaatcataaggctgcgatggagctcatgggcacatgggagcctggagttctcaaggacctgactccggacaagaagccaatggctgaccttggcttcttcgccttcccgaccgtggacggaggaaaaggcgaggaaggtgctttgatgggcgctgtgaccggtttcgctgtcaatcccgaggctccggacgctgctgttgatttcgtcaatttcatggctgagaaatcaaatcaggagaaatacgccactgcgttcagcaccattccggcttccgccgaagcttacgatgcggttaccgatgaaaatcttaagagcatcatcgaagctatgaaaaagtccgatggcatgcagctgtggatggataccgctctcggcggaaatattggcaacgctcttaattccggagtggtgaatctgctttccggacaggggacttcggctgacatcgtcaaggcgatgaaggacgcagcgtccaagggctgatagtgaacatggctggttgacggccaaaggagggtggatagacagatattcatccaccctccttcctattcgagaaacgtatctggtagtggagaaaaccatgtcaagtacaagcaaagacgcggtgacgctgcgcgctaagcggtccaagaaaccgtccgatggcaaaatgcgtcgtaatgttgagattttcgtactgtccgcacctgcgattcttctgttcgtctgctttgtgattctgcctatcgtcttgggtgcttattacggcttctatcagtggaagggctacggagttccctccaagacaggtaaattcgttggtctccagaactacatcacagcgcttaaggatcccgcgttccaggcggcgattctgcataccttcgaggtcgtgatcggctcgttggtcatccaggctccgctcgccatcctgttcgcattgctgctgaaccagaagttcaaggggcgtggtctcatccgcaccctcatcttcgtgccgtatgtcgtttccgaggtcatcgtcggcacaggatggagcctgttgctgcagaagaagggcgccatcaatgagattctggccaacttcggcatcaatggtcccgattggctggccgacccgaaaatcgctatttggacgctgctgttgctgatcagctggaaatacgtcggtttcgccgtaattctgatgctcgccggcatgcaatccattcccgaggaactgtatgaagcagccaaggtggatggggcgagtttctggcagatgcagaaaagcatcacgttgccgttgcttgctccgacgttgcggatctgggtgttcctttccatgattggctctctgcagcttttcgatctggtctatatcgtgtggggcaagtatgtgtcgaccaccgctggtgtgtccaccatggccacctacatggtgcgtgaaggtcgtggagccggcaactatggctatggttccgccgttgctctgatcatcttcgtgatctctttgatcatcgcactcgtctatcagaagttcgtgctgaaccgtgacttggacggtgctgttactgaacagaaagaagccgagaagcgtgccaggaagcgcgcaaaagaagtgcagcatcgtgaggttgctgccctggcaagtgaggtgaagtgatgactgccgcaacaatcgcaggacattccaacaaaagcgagtacagcaagaagaatggttaccgtaagtcatccaagacgccatggggcaacccaatcgtctacttcttctccctggtgcttgtggccatctgcatcactccggtgctgtacattatcttcggcggtttccgtaccaattcgcagatcaccaaccatccgtccgggatgccgaacccatgggtccccgacaactacaagacggtcttcgaaagtgatattttctggacggaactgaagaattctaccatcgtgggtatcgccaccatggtaggcgtcgtggtgcttagcatcatggtgagctttgtcatcgcccgatacaaattccgctatgcgccgcttatgtacgcgttgttctctgctggtctcatgttcccgatgaccgttggcattacacctttgtatctgctgattcgcaatctgggtctggccaactccctgtggggtctgatccttccgcaaattgccttcggacttcctcagaccatcatcatcttggtgccgttcctacagtcgattcctaatgagcttgaggaggcctgtcttctcgatggatgctcccgccttggcttcttctggcgcatggtcattccgctgtccatgcctggcgtggccaccactggaatcctcaccttcgtgggaagctggaatgcctacatgctgccgctgttcgtgctcagtgatgccaacaagtacacattgccacttggcgtacagatgttcagctccgaacactccgttgacaccgcacaggtgttggccttcacctctctggctatgattccggccctgatctgtttcaccatcttccagaagaagatcgtcggcggcctgacaggtgcggtcaagggctgacgaaatgtgacaatccacgcccggaagatgttcctttccgtcttccgggcttcatctcttatgcaagaggtacattatgaagatttccaacccggtgctcaccggttttcatgccgatccttcaatgattcgcgtcggtgacacttattacattgccaattccactttcgaatggttcccaggcgttcgcctgcatgagtccaaggacctggtgcattggaacattcttccaagcccgttgagccggtccagccagcttgatatgagaggaaacccctcttcgggcggcatctgggctcctgacctaagctatgcggataacaaattctggttgatctacactgatgtcaaggtggtcaatggtgcattcaaggattgcactaattatttggtcaccgccgaggacatccacgggccatggagcgagccggttcgtatcaacggggtcggttttgacgccagcctgttccatgacgacgacggccgcaaatacttggtgcagcagacatgggatttccgtgaataccaccaccagttcgacggtatcacattgacggaattcgacgtcgacaccatgaagctcaagccagaaacggcccgcaccatctgggatggcacctcggtgaagatcaccgaaggtccccacctatacaagaaggatggttggtactacctgtttgccgcagaaggcggcacggtgtatgagcatcaggaatctgtggcgcgttcccgtacccttgacgaatgctccttcgaagttatgccgaatggcccgttcatcggtaacttcgacactcctgacacctatttgcagaagcagggccatggagcgttggtggacaccccgtccggcgagtggtattacgcctccctatgcggtcgtccgtggcgtcatgataccgaaccggcccatggcacccgcggatggtgcacactcggacgcgagacctccatccagaaagtcgaatgggatgaggacggttggccgcgcgtggtcggaggccatggcggacagcgttacgtcgacgctccgaaagacgccatcgagaccgttgccccagcgacgcgcgacgagcgcgacgagttcgaatccgacgaactcggaccgaattggaacaccctgcgcgtcccgttcaccgacgccatgggcacggtgggcgacggcaaactggcattgcgtggtcagggctcgctgtgcaacctgtttgacctgtcccttgtggctcgtcgctggcaggcattcgatttcgacgctgagaccaaggtgcatttcgatccgaagaactacatgcagatggcaggcctgaccaactattacgatgacctatgctggtcatgggcgtttgtcacttgggatgagaaacgacatgcaagggtcatcgaagtggctcagaacgatttcaaccaatatacgtcgttcctcaaggatgacgccatcgtagtgcccgaagacgccgaagcggtatggctgcgcaccaaggtccgcacggaatactattcctacgaatattcctttgacggagaacatttcaccgagattccggtcaagctcgatgcgaagatcctgtccgacgattacgtgaaccaacgttacggcggcttcttcaccggcgcgttcgtgggtctcgcctgtgttgatctgtctggctatgacgcgaaagccgaattcgactatttcgattatcgggagcttcccgacaaccggtagtcgatgccgacgggcggcgattcgccgcattcctgccgcccgtcggttatttggtgaaatgaacgcagactcaatggggagaatgctgagatgactttgcgattgccgaaactacttgacgacggctgcgtgctgcaagccggtgtggacatgcatatttggggcaccggcgatcccggacgcatcgtattgacacggcttgctgacgagcggcatatggtgcaggtgaaagacgacggaacttggaacgcgccgtatggtccgatcgaagctggagggccgtacgagctgaccatatgctacgaggacggagcggagcgtatctcacggcagtgctatgcgggagaggtgttcctgtgctccgggcagtcgaatatggaactgcctatggcttgggtgcgcgccgactatccacaggagtgggaccgtgatcccgatccattgctgcggcagtacaaagtgattcccgattacgatttcaaaggtcctcgcgacgatcacgaccgtgcgttctggcagggctgtgatgcggatacgcttgatgatttctcagcgctcgcatattttttcggtcgcaggatccgccagtggctcggtgtgcccgttggtctgttgaacatttcattgggcggctctccgatcgaatcctggatggacattgacacattacgagcgttccccgaagcgctcgccagtcttgaaccgtaccttggcgatggtgtggcgtcgaaaagaagcctcgattccgttgccgagcgggaccggtggtaccaggcgcttggatacgaggccgtggccgatgcgcaccatgagtggctgccattgatcgcgtgggactgtccggaatccaagaacatcgagccgcgcgacgtggcatggcatgacatacgcctgcctggatggtacaaggatcgcggacttgccggtttccgcggcgagattaccatgagaaaaaccgtgttcctgcctccgtcggatgcggggaagcccgccctactgcgtctgggcaccatgaatgatgccgaccatacgtgggtcaacggtgtgttggtcggtgggcgaagcaatgtgtatgagccgcgggactatccggtcgcagccggcgtgctgcgcgccggcgcgaacgaaatccgcatgcgtctggtcgttgaacggcccggcggccgtgtgacgcccggcaaacggatgacactgaccatcggagacgatatcttcgacctgtccggcatttggcagtatgccgtgaccgccgaagccgaccgcgattgcccattcgaggatttcgtcagatggaagccgaccggcctgtacaacgccatgctcgccccgtgttttccatatgcggtgcgggccgtgctgtggtatcagggcgaatcgaataccggcgactacgccatgcgttatggcgatgagctgaaagccatgattgaattgtggcgtggcaagtggcatcagccggatatgccattcctgatcgtccagcttccgaaattcggcatcgacgccatcgaggatggtggttggccgcttattcgagaacaggaatggagagtggcggacgaacttgaacacgtggctgcggtggtgacgcttgatgccggtgaaagcaatgatttgcatcctcatgataagaaaaccatcgcggatcgtgcattcaatgtcgcgatggattttgtgtatggccagcaggctcagcctcagccggttgttgaaaccgcagaggcggacgatggattgttgaggatgcactgcgtgtggcggaattccatgggcgaacagatgcaatcgcagaatcgccatctgatgacgttggatggtgacgttccgcgagaaattgatttcctgtggcacgactgcgccacttcggtgcgggctgaggcatggctggatggttgcgatattgtggcgcgcataccgtcgcgcatgccggacgaggtgcggtatgcgtggagcaacagcccggaatccggtctcatctgcgacggggacggtgttctgcttccgccgtttcatctgccgttgcccatggttgattaggagcagtcatgcgcagacaagtcatgattcgtcaaggatgtgtcgacggattctccgatgcggatcctgtgatcaccgtgtttcggggcattccatatgccaagccgcctgttgatgagttacgctggcgtgagccacaacctgctgaagcgtgggatggcgtgctcgaagccggtgatttcgcgccgatgccgatgcagccgctgcccggctcggatgagttctacggcagggaatggcagattgacgctgacactccgatggctgaggattgtctgtatctgaatatctggacgccggccttgcgtggatgcggcagtggttccgagattcgtacggattcccgttgcgatgggcatgggctgcctgtgatggtatggctttacggtggagcgtttcagactggatctacctgtgagaaggagttcaatggagagcagctggcccgtcagggcgtggtggtggtctccattgcttatcggttgaatgtgtttggttttttcgcgcatgccatgttggaaaaggaagcggttgatggacggccttgtgcgaatttcggatttcttgaccagcggatgggcattcagtgggtaaaggacaatattgccttgtttggtggcgatcctgcgaacattaccgtgttcggccagtccgcaggggccgcaagcgcgttggcgcaaagtgtctcgccgatgaacgatggtctgttccaacgcgtcatcatgcagtctggaggtggaactggtctgttcaatcgccatctgtggtctcttgaggatgcgcagcgaaatggagcgcgttttttgaagtatctggaagttgaatcgattgccgaggcgcgttctgttcctgcgactgatctgctggaggcggcggtgacttttcctgcttgcgattggtctgggcagggtgatgatgtcgtatgggctccgatgactaattggattccctgcgtcgatgggacattccttgtcgagcaataccgtgatgcgcttattgcgggacatcgcgttccgtgtgatttgttggtggggaacacgaccggcgagttcatggttccgggccctgatggcactccgtatccggagggtgaatgcggcaatctggatatgatcgatgcatgggtgtcaggcggcggctcggaaccatacagatatcgattcgatgtggatatgccgggggatgatgccggtgcgtttcattcgtccgatttatggttttcgttcgggacgctccctgcgagctggcggccgtttcgaggctggcattacgatttgtcccatgcgatgaaccggtattggacgaatttcgcggcgacaggtgatccgaacggttccggattgcctgagtggacggcatgcggacctgatggtcaacgatatatgctgttcggtggatgccacgatacgccgggtaacgtttcatgcgtcatggtcaagtaagtgaatatagtatggtgtgagcgttcactatagtgcggtggaatgtgatgaaggagacggatatgacgcaggagacggaggcgctgatcgcgtccgacgaggatctgaccaaactgttcgccggcaagccgacgcagtaccgcaaatcgaagtcgctgccgaaattcacgggcgaggccatgcgcgcctgcgcgaagatcaaccgcatcttcttcgatgacccggacgaggcgtatcggctgttccatgagctggtcccggacgcgggggagggcgtgcagttcacgccgccgttcaacgtcgactacggcatcggattgaccattggccgcggcacgttcctcaacaaggatttcatggtgtgcggcggcggatatgtgacgctcggtgaggattgcctgatcggtccgcgctgcaccatcaccacacccaaccatgccaaggacgccgccacccgcctggcgggctgggagcatgccagtgccgtgaccatcggtgataacgtgtggttcggcgccaatgtgacggtcacgccgggggtgaccatcgggtcgaattccatcatcggcgccgggtccgtggtgacacgtgacattccggagaacgtcatagccgtgggcaatccagcgcatgtgattcgtgagattcccgaacatgaccctgccttcgccgatgtggaaggtttgctgtagttttgcaaacgtttcatagggtgtgttgacggcaaatcgatttctccagccatgcgatgcaggtgagcgcgtaaagccttatacggaagctgtcgttcatattgtcgtttctatgagtatggttcatgaatcagcatagggccgggaagccccattgttgggaagcttcccggccctatgcctgaattcctgcggtgatggatcagccgcgggccttggcgtaggcttcgtatacggcttcggtcggttcgccggtctccacgccgtcgatggtgagttgccatgccggaggctcggtttcgccggacagcacccaggcggcctggcgggccgcgccgatggccacgtattcgtcggtggcgggtcgggtcacgtccatgcccagaatgcttggtgccagcgtgcggatagcttcggacttcgcgccgccgccgatgagcagaatgcgcgtgatgcttgcgcccagggatcggatgagctccaggcagtcgcgctgggagcacagcagtccttcgacgaaggcgcgggccaggttctcgcgtgtggtgttggccagagtcatgccggagaaggtggcggtggcattcgggcggttcggcgtgcgttcgccgtcgaaatacggcaccagggtgatgccgccggctcccggcttcgaggcgaaggccagcttggccagttcgtcgtaatccacgccgagggcggcgcggccggcgtcgaggatgcgcgaaccgttgatggtgcaggccagcggcaggtagtgcccggtgcagtcggcgaagccggatacggcgccggtcaggtcgtaggttgggttctcggagatggctgcggccacgccggaggtgcccagggaaatggacacgtcgccgacggccatgcccagtcccagcgatgccatggcgttgtcgccgccgccgggggcgagcaggcagccgccttcgacgttcttgccggcgatggccggatcggccttgacgggggcggcgtcgcgcggccccagcacggtgggcagcacgatggcctcggcgtgcgattgcgcggcttcggcgccttccgcggcctcgagcaccatggcgatcaggtcgcggcggtattcgttcgacgcggcatcgtagtagatggtgccggaggcgtcggagcggtcggtgaacagggcttcaagatgggcgtcctcgccttcggtgaccgggccgtaaccggcgatgcgccagctcagccagtcgtgaggtaggcagatggcggcgattttcttggcgttttcgggctcgttctcggccacccatgccaccttggtcagcgtgtaggaggcgacgggggaggagcctacggccttgacccaacgctgcttgcctcgggcgattgggtcttccggctcgccgtcttgtgcgggcgctgcgccgagcttttcgatcagagccgcagcctggggcgccgaactggtgtcgttccacagcatcgcatcgcggatcacattgccttggttgtcgaggatcaccatgccgtgctgctggccgccgacggccagcgcggatacgtcgtccaggccgccggcctgctcggcggcctcttggaatgcgctccaccagtatgaggggtcgacggatgtgccgttcgggtgtttggcctgcccgaatcgtacaagctcgccggtttcggcgtccgtcacgcgtaccttgcaggactgcgtcgatgtgtcgacgcctgcaaccagagtccttgccatagtttgtgttgcctccttgcatgtgccgttcgccggtggcgcacggttaatagttagatgaataaactatactatagtagtgtagcatcaggaaaggctccggaacatcggttcggggaattcatgctgatgcggcaacacggcaaacagggcagggacgggaacggctatggcatctcttcgcaggatcaatcaggacgatctgcgcaatcacaatctttcggtggtgatcgacacgctactgcgtgcctccgggccgatgagccgagcggatcttgccaaggagaccgggctgaccaaggcgacgatgtcgttgctggtgtcgctgctgatcgatgcgggcgtcgtcaaggagggtgagccgcagaactcggccagctatgggcgcccgtccacgccgttgatgctgggaggcggcaaggtgtgcggcgtcggcatgcaggtcaacaccgacggctatggatgcatggctttggacatcaaccacgacatactcaggcacgaatgggtggatgccgacatgagcggcgtcgagccggacgtcgtattcggcaagcttgacgccatggccaaggcgatggctgaggatctggaatcgaaacgatgcatcatcgcgggcgtctcgtgtgcgctgccgggcttggtcacctccgacaagaggctgctcatggcccgcaatctcggttgggagaatgtcgatctgaccacgttcgacgttatgcgagggtatgacgttaccccgtgcaatgaggcgaagctggccgccatcgcgcagattccgggatatgcctgtgcgcgtgcggacgtgttcgatggcgtggattgcgccgactctttcctgtatctgtcgtgcgatatcggcatcggcggcgcgatcgtccgtgacggtgagatcgtgtcgggaagccacggtttcgccggtgagatcggtcacgtgtcggtgtctttggacggtccgctgtgcggatgcggacgacgcggatgtttggaaacgtatgctggccgtcgcgcgctggtcgaggcttccggagtggccgaaaagaatgcggcttcgagcggtgaggcactggagcgtctgttggacgcatggcattcccatgatgtgcggaccgtggaggccgtcggacgggccatcgacgcgctggcctcggccatcggctccgcactgaatctggccgatgtcgataccgtgctgctgggcggttggtggaccgatttcgggccgttcttctacgaaacgctcgaaaaccgtttggaatcgcaggtcttgggggcgtcggacatgcaggtgagcgtgtccatcccgttggtggccgaccatccggcgttgtacggtgccgcggaagtcggcttgcgcaaattcatcgacaatccgctgacgttcatcaccgacaaagcatgattcctgagcgccgccgcaacgtcactcgtgcgcattgacatattgcggattctccactttgcccgttccgccataccgtttgaagccccacagcagaatgagggatttcgcatacgccacccaggcgatgccgaagaggatggcgagaacgcgtatgaacggtacgaaatatgacaggccggccgcgagtacgtcgatgacgacgaggacgagcgagcaggggaaggctcgccaggggaacatcgccgatagcgagaagagcctgccggtggtgttggcgaagcgtgcctgcaacggtgcgacgtattcggcgaacagcgccacgaccacggcggcgatgaccagaaggatcagcggtatgtaggaggcgttggtatcccacgccttccagaacgacaggccgaagaggatggcggtggcgaggatggcgacgagcacccaggccgcaagtccctgtttgaactcgcgtttgaagcgggtgagatattccttgacgaggcggatgtcgtcatgctcgtcataggcgaacattgtggaatacaatgccgcgcgtgccgggccgatggtgacgtttgggattagcgtgatgaggtagaccagattaagcccgacgaaacgcagcagggtgtccatgaaacgccagaagggcgcgttgatgttgaaccgcatgaatcctcctcgatgatgtgttcggctattgccgatagtactgtgccgtattgtgcgacacgccctatttataagattataaatagctctccaagagcacttagtttgttggaataacaatactttagcgccgatgcggcaagggttttgcggccactgccgtcgctgcaggaagccgctgaaatggacggcgccggcacgctgaccgtgttcacccgcatcatcctgccgatgtgcacgccgattctggcgaccgtgggcatcttctcggccgtgaaccagtggaactctttccaggacaccctgatctacatgaccgattcgaagctctactcgctgcagtacctgctgtacacctacatcaaccaggcgtccgcactggcgaatgcggccaaggcgaattcggcgaatgtcgccgctctggcaagcgccgcgacgccgacctcgatccgtatgacggtttccgtcatcgtggtgctgccgatcatgttcacctacccgttcttccagcgcttcttcgtcaagggcatgatgctgggcgcggttaaaggctgattaacaacacaacgattcttttccccataactgaatatcagaagaaggaatacaaggaggtttccgcatagaactgaagaaaatcaccacccgcgcgattgcggctggcgttgcggctgctacgctgctgtcgctcgcggcctgcggcagcggcagcaacagtgccgacaccaaggacgacggttccgaaatgaccgtcgaggtcttcgactcgctggccagcagccagggtctgcaaaagagcggctggttcgccaagatcgtcaaagacaagttcaacatcaagctgaacatcatcgcgccgaacgtgtccggcggcgataccgtgttcgatactcgctccgcttccggcaaccttggcgatctggtgattgtcggtaccggcaacgggcgtctgaacaagctggtcaaggccaagctcatcgaagacatgaccccgtactactccagcatgaagaatgtcaagaagtacgattccgcggtcaagtccatcgccaagcaggccggcaaggatggcgtgtggggtgttcctcagggtgtctcctcccagtctccgaccgacccgagcgaaggcaacgagtcggctgccgcaccgtacatccgctgggatatctacaaggagatcggctacccgcagatcaaggatctcgacggtctgctcaatgtgcttaagcggatgcaggacagggctcgccaggataccggcaaggacgacatctacgccatgtcactgttcaaggatcgggacggcgatgtgatgcagaacgccgcatccatctgcagctggttcggctacaccaaccagggttccgtgttcatctccgccgacggtaaggacgtgcagcccgccaccaaggagggcggcatctaccagcaggccctggagttcctgaacaaggccgaatccatggggctggtcgatcctgattccaccacccaggactgggataccatgcggaccaaggtcaccaacggcaagaccatgctgtccatctggagctggctgggcaagccgcgtatgaactccgacgagaacaaggccaaaggcgtcggcttcatgctggctccgcttgagaacatgaaggtctattccgacggcttccagcctgacggtgatggcgccaccatcgtggccatcggctccaaggccaagaacaaggcccgtctggccaagttcatcgactggatgtattctccggaaggcatctacgcctcttcctccaactccggtggcgccgcctgcccgaaggatctgggctgcttcaccaccgacaaggacggcaagaacccgaccctgaccaagttcggccagcaggccatgaccggcgaccacgccaacctgaaggtctccgccaagcttggcggctccagctacgatgacggctactctaagctgaacttcaaggccgtgtctcagaacgacatcgacccgaacaccggcgaggcctacaacccgctgctgtggaagtccaaccaggatgagaccgagctgttcaaggattggtccgcccacatggagaacgccaccaacgacatcgactatctgcagaaggcaggcaagctctccatcgcagccggtgcgtcctacaccactccacaggaggattccacggtttccgccacccgcagctccgtcaagtccgaaacggtgaacgcctcctggcaggccatcaccgctgcgggcaagttcgagaagacccttgacgaagcccgcaccaagatcgacaacctcggctacaaggaagtcctcaaggtcgaccagcagaacgccaaggacctgatccaggcccgcaaggacatcgtcaagcaggccaagtaattcctggcgttccggctggagcgttttcgcttcggccggaacgcctcgcctaatcacataaccaacaaggggcgtcggactcttcgaaccgggccgacgccccgcaactcttccggttccgcatattccgacggacgtcgtcgtctccttcttgcctgtcggaacttttccgctttttccatgtccactttcctccatgctttcgtgaggagcgcgttcgatgatgaatctccacaccgtcgaatcgcaatgaaacgaaagaaaaacgcatgaccgtaattactgaagccaacaaaaccaaagccagggaactgacggcgcaactcacgctggacgagaaaatcgccattgtgcacgccgcaggcctgttccgcaacggcaacgccgaacgactgggcattccgccgctcaggatggatgatggtccgatgggcgtgcgcgccgaactgcataacgacaattgggcgccgctgtacaacacccgtgactatgtgacctacctgccgtccggctcggcggtcgcctccacatggaaccccgacctggcccgcatgaccggtgaagtattgggggaggaagcccgaggccgaggcaaggacgtgattctcggcccttccatcaacatcaaacgcagtccgttgtgcggacgcaatttcgaatacatgagcgaggatccggtcctgaccgccgcgcaaggtgtggcctacatccaaggcgtgcaggaatccgacgtggccgcctgcgcgaaacattatgcggtcaacagccaggaaaccgaccgattggacgttgacgagaccgtaagcgagcgggcattacgcgaaatctacctgccggccttcgaagcggcggtacaagacggcggcgtgctctccgtcatgggcgcctacaatctcgtcaacggcaccaaatgctgcgaacacaagcagctgctcgacgacatcctgcgcgacgaatacggtttcgacggtttcgtcgtttccgactggagcgcggtgcgcgacaccaaagccagcgccgaagtcggcatggatatcgaactgtccgtcacgccgaatttcgacgattactacttcgccaacccgctgaagaaagccgtggaagacggcgacgtcaaggaaagcgacgtcgacgggaaagtcgaacgcgtgatcgccgtcatggacgcgctgcacatgctcggcgacgcgcacgcaagccgcaaaccaggccgttacgcgacgctcgaccacgcggcgaaggcattggacatcgcccgcgaatccatcgtgctgctgaaaaacgacgcgcacctgctgccgctcgacgaacgcaacatgacccgtctgctggtcatcggtgccaacgccgaccgcatccactccaacggcggcggctcggccgtcatcaaagcgctgcacgaagtatccccgctgctcggcctcaacggcgagctcggcggcaacgtcgaaatcgaatacgcgctcggctacgacgccaaacagatcaaccaggacgaaagctggcaggaggaaagccttgagaattccaagggttccgatgccaaagacgtgaatcgcgcgcgcgaactgcgtgacgaggccgtggcaaaagcccgcgcgtacgcggccgccggagatccggtggtcttcatcggcggactcgaccacgaacatgatctggaaggccgcgaccgcaccgacatgcgcctgccgtagggccaggacgagctcatcgaagcgctcaacaaggcgtggtgcgccaatttctggagccacaccatctacgattggggcgacgtggtgcccgcccgtcggctacggcgacggcatcagcgacgccaaatgcgtggtgtccgggctgcagatggactatcgccgcttccaaagccaggcgcagttggcctgctatacgaacgagcgcgacgcgatccgcgaatacgacgcgaccacgccgatcaccacgaacctcatgggcacgttcaaggatctcgactacttcgagtgggccaaggagatggacgtggtcagctgggacaactatccgggcatggacaccccgccgagcttcaccgccatgtgccacgacctgatgcgcggcatcggcggcaacaagccgttcatgctgatggagcagaccccgaaccagcagaactggttcccgttctgcaaggtcaagcagccgggggaagtgcgtaagctcagctggcaggccgtggcccatggcgccgacaccgtgcggttcttccagatgaagcagtcccttggcggctgcgagcgattccatggcgcggtcatcgcgcatgacggcaccgaggagtcccgcgtgttcaaggagaccgcggccttgggtgaggaactggaccgcatcggcaggcggatcatgggctcgcgcatcgaatcccgtgtagccatcatgttcgactggcagagctactggtcgcttgaaggctgtgtcggcccgaccaccggcttcaactatcccaatgaggttcatcgcttctaccgtgcgttgtggcgtcgcaatgtgccggtggatatgatcgccagcaccacgcctcttgcgcggctcagccagtatgatctggccatcgccccggcgctgatcaccgtgttgcctggtgtggctgaaacgttggaagcctatgtggcggatggtggcaccttcatcaccggctatatggccggcatccatgatgagcatgatctggtggtgccaggcggctacccgggcaagctgcgcaggcttatgggcgtatgggtcgaagagatcgatgcgcttgcgccgggcgaaaccatcgaagtgcatggcggcacggttgatgccaagggcgagatcgtggcgagcattattcatcgcgaaggtgccgagcgtcttgctacgtacggcggcgacgaattctatgctgggcattccgcgctcaccgtcaatgcgtatggcaagggcaaagcctattttgtgggcactccgttggacgagaccggcatgagcgcgttcatggctccgatcatcaaggagctggatctgaagtcgcttgataccccggaggatgtcagcctgtccgtgcgctatggcgatggcggcacccgctacgcgttcctcatcaacaacagcgccgccgacaagcgtctgtgcctcagcgaactcaacggtggcacggagctgctgaccggcaccgtcatcaacgatctgatcgagcttaagccgtatggcgtggatgtgattgcgttgcggtgatcgcaatgctgtagaccacgttagacggagcggaacgactccactcgacgaagccgaatatgaagaaggccgatgcccttgatggacatcggccttcttcgtcaggaaccggtggtatggcgccgttccgcgttcatcgggtggctgcgatcacaccgccggtcatcatcacgcctgcttcttcttcagcagaatcgcggcgcctgcaatcagtgccacagccgcggcgaccgccatgccgagcacggaggagccggtcgaaggggtggacgtgacaccggtcggtgttgtggatggcttcgtgtctgtggcaggctttgccggggtcgttggcgtcgtcggttcaacagcgtccttttcgaacacagcctggatggagacgctgccgtcaggcatctcgaaggcgttgttctcgatggagacgttgcccttcagcacgttccactctttgaagtggtagcccttgttcgcggtggccgtcagcgtgaccttgctgcccttggccgcgcgctcgacatccgcggaggcggagccgccttcggtcgcggagacgttcacggcgtactgcgtattgcgcacgcgccacagctgggtaccgtagaacgggttcgcggtgccgaccaccatgtagtcgtcggtgtcgcagaagatgcgcagaccgtggttgaacgggtcgccgaagccgttgtcggtaacggtgccgacggtcacgccctcattcgcggcggaacggtcggtgatctcgaacaggttgaagccgcgcttggacttggccaggtacggcagggacttggcgtaggccttgaggttggccttgctggtcagcttgaccagcatctcgtacaggcccttgaacttgtcgggaatgatgtcggcgatgctgaagaacgcgtccgtgacttcgccgtagttgttggcgaaatcggcggagcccttgtcggacagctgggagccgaggttgtccagctcgttgttgatgtcgaagagctgcgaggcctcatcggaggagccggaggctgccaggctgcccggaacgatgctgccgtccttgatgccgtcgaccagttccttggtctgggcggcggtcaggctgatcggcttggcggacgagacggacttggcgtcggtggtctgcggctgcgcggcggaggcgtccttgccggcctggatgcgggcccagtcgaccagcgcctccggattgtcggtggacggcatggtctgggtggtcaccttggcgttctgatcgttgctctgcgtggcgatggcggaagccgggtcggtcgggcccatgccccacagcaggcgcaggaacacgcgcaggtagtggacggtgttgttccaatccttctcgttcatgttgagaatgtcaccgttggtgaactgtgcgatcggttccagcaaggtggtggtgttcatggtggacaggtacatcttgccctcgtgaacggtggtctgccaggtgtattggttcatgtggttgtcgtagccgctgcccagaccggtggaaccgcccttcgggaaggtgtcgttcttgtcgcccacgagcatctcgacgttctcgttcttgtccatgcggtataggttgacggactgttcgaggttggtggcttgggttacgaagttgcttttggtgacgaagccctgcagtgcgctggacacgtcgttgtagtcgccgatgtacaagtggtcgccgtagacctgcagggtgcaggcgccggcgctcacacggcttttgtcaagaccgtagtagtacttggcgcccttggcggtgtcgcctacgagcggacgccaggtccaatcggccttgttggtggaatcgcccttgttctcgcccacgtaaatggcgaaggagcgcatggttccggtctcttcgttcagggtgctggtgtcgccggtgcagaccacgacgtacagcttgccgttgaactcctgcacctgatagataccgccgccgccgttgacatcctgtcggtggatggcgggcaggttgtcgaagctcgccatgtcggcgatcactttgtaggagttcggatcggacggggtcttggatgccacaagcagcgccttgcccttgccgtccgcggtcggcttgaggtcgccggcgatcagcgtattgccgaaggagccgatggcacgggtggaggtgaacacgttgcccttgaccagggaacggaagccatccacgtcgacgctgtcatacaccttggtgagcttgtcgttgttggccgggtcgacttcgtagatgcacgggaatccgttttgataggccatggcggtctggatctcctgctgggtgagatccttgttgttggtgtccatgaccatgccctcgaagtacagcttgccgttcatcttgaaggcgctgcggaaggtcgggatcacgcccttgcctccgtcgatgccggtgctcttggacatgaggatcttggtcttgccggtcttcacattgaacttgaacagcatgccgccggcgctcttgccgtcgggttcgccaaggtacatgttgcccgcgtacatggtctggatgagtgcggtggcctgcttggaggtcaggccgaggcttgtcatatcgcggttcagaatggcctgcacgccgaggccgccgtacatggtgccgatgtagacccagtcgccggaggatgctgccgcatagctgtaggactggccgcggtcgccgttgccggtggtgctcaggccggcggtatagggggcgatggtgccgtcgccggtgtaatcgaccacgccatcggcctggctcaggccctgatcggcgtggctgaccttttcgaaggtcatgccgttatcgttctgggaattgtaggtgtattggggagtcaggccggcggagtcgtccgccatggcggtggccgggattccggcgagagccgttgcgcaagcgacgattgcgctaaggcatgcgattgccttgtttctcatctatttctcctgtcttcgcgcgacgtggaaaacgtcattgatgggggcatctagggggatgcccgccgtaagcggcgggagtcataaaagcgtgtattgcaagagcctccaataggcaaccgtatcgataaatattgacaagttgttatggcatatgttgcacaatggcagacgaatatgctatgacgcacttcgattccgccattgcattggtggtacgcaaaggggtgttggctgagcgtatcgggggatggggcggaagcgcttaagtatgggcgggaacgctatactgtaccaaggcaggattttattaaagatgggttagataacgatatgactgcaaagaagcgcatccttgcgttcgaaatcggaacgttcttcacccgatacgtggtgttcgaggacgggcgcatgggcattccgggtactatcgcgactccggtcgacggcgaggagcccttctaccaggcgctcgcgcatattgtttccaagcagcgtgcccctcttgacggcatcgccataagcgtgcccggcttcatcgacacggagaagcaggtcgccgttaccgccggcgcgctaagcatactgtacggccatgaaatcggcagaaaactgcagggctatcttgacgacccgatccccacatggatggagaacgacgccaactgcgcggcaatggcggagaagctgagcggcaacgccgtcaaactcgacgattttgcgctgatcaccatcgacagcggtgtgggcggtgcgttgttcctggacggcaggatccgccgaggcaaggattggcgtgcaggcgagctgggcatgatgatcccgaactatgagaccggtggattccacaccatgcaggattacctgtcgaccatcgtgctggcggaggagtacgccaaggaattcgacgtgccgacaggctccatcgtgccggccaccctgttccatcgtctcgatgagccgcgtgtgcgcaagatcgtggaccggtggatcgactatcttgccatcggcattttcaacatcgtcgccgtggccgaccccgaatgcgtgctgctgggcggtggcatctgccgtgaacagcaattgctgccgctggtcaatgcggcgctcgacaagatcccgcagtggagcgatttccacacggttgtcaagcgctgccggcacaccaacaacgccggtctgatcggagcctactacgccttcgaaaccgaggtcgaaggcatggagaaggtgccgatccgctagtcgcggatgcttccgatacgaaaatcggcgggtccgcttcccgtgaacggccccgccgatggcgaatatgcacaagagcggtgggcggtcgatatcgatcttccgctgtaatgctctgctgatcttcggggtcagagctactgccgtgccgacaaggtaagcggcagcaggcaggattcgttcttcgggtcgtgctccgaggggtcgcggaagccctgccattcgctatcggggaagatgatgtcggagatgctcatccattgctccagcagattcatcgaattgtcacccagccaacggtactgcagaccgtccatggcgctcatcgccagggtgtacaggtcgtagaaccgttcctcgtccacgtccggcggcagcagccagttcatcgagcaaatcatctcccattggcgcaaatggcggccgatgaagaaatcgtgggccgggtgcgaggggttcagcgcctcgccgttcagcaccgaatacagctgcacgagctcggggcgctgcagattgtacagcacgatgttcaggcaatagcgcgggtagtagtagacgcggtgcccgtcggcgtcgacgatggcggccgtcaccgcgttgtattcgtcggcatcgatggtgtcgtagcattccgacagcaccatgttgagcagatcgtccttcgaggagatgtaatggtacaacgccgcctcggtgatgcccagctcgtcggagatgttctgcaacgacatgccccagaaccccttggtggcgatgattttgacggcggcctgcaggatttgcaggtggcgttcctcctgactcatacgcttgcgtttgacgaaggtcttgtcgcccagcgtgtccctggcggtagtggcccccgtagcgttgccgatgcgtgaggcggccggccagttgctctggtcattcaggaatccatcccatgccgcgacgctcatagccagctccttacacccctgctcatcgtgtccctcataaaaccatccaatactattacgccctctggcctctaggcgaagagtcgccgtagccacgcgttggccaacaccggccattgctggacgcgtggctcgatgccattaaccccctgccacgccgtttccgcagtgccaagcgccagaccatgcccgccttgggggaacagatgcgcctcgaccggcacgccggccttcttgcaggcatcgaccaacatcagcgtgttctcgaccggtacgcaatcgtcggtgatggtatgccatacgaatacgggcggcgtcttcgcgtcgatatgccgttcgatggacaccgcgtccaacgccacctgattatcgctgttgtcgccaagcagacagtcgaagctgccacgatgcgcgagcgggcctgaagtgatcaccgggtagccgagcatcaatgcgttcgggcgcaccgcgtcagggtcatagccatgtgcccgcatggtgtcgtcacccgccgtggtcgcaagattggccgcaagatgaccgcctgcggaaaatccgattaccgcgatcttactggggtcgcaatgccagtcgtccgcatgcgcgcgtatgcgctgcactgcttccgcggcttccagcaaagccgtggggaagacggatggcgcgacggaatagcgcagcacaaacgcgttgcatccggccgcgaggaactgcatggcgatcggttcggcctcgcggtcggaggtcatggcatagccgccgcccggaatcaccagaacgctggggcgttgacgtttgggatcgatctcctcgctgttgtcgagaacgtaccggacgaacgtggcctcactgccatcgatgccggtgatgatgtcttcacaatactgcatatcgctaccttagacggattgtgtgtgcgaatccatgcggccttctatgcggcacacggattcgcactgttctgatcggttcctgccttccacaaggttgcaggaaaccgatggaggatcgccggaacaacctatatgcaagatgctccggcaatccatgttcatgttgaggagagtgtaggcccgccccgtttgtgagcacgttctgatgctcacatcagaacgtgacctcgacatcgacggatttggcatcgctcaaagcgggaaccacattaccgccaatcttcgctccgtcgacgctcaccgtgcgctcgccggtgcgcttcatggcgatgcggtaggtcacgccgcggaacacgcgcgtcacggtcagctggtcgaaccgttccggcagatgcggttcgatggccaggccgtcgagcgtcggtcgcacgcccagcagatactgcgacacgtccacgaacgtccacgcggcggtgccggtcagccaggagttcttgccctcgcccggggtcgctgcctcgggaccggccaccatctggcagtagacgtacggttccaccttgcgcacgtcggacttgtcctcgacatacgccgggcagttgcgctggtagacggcgaatgcctcgtcgtcattgccggcgatggcgttggcgatggagatccacgggttgttgtggcagaagatgccgccgttttccttgtatccgcgcggataggaggagatttcgcccaattcgatgcggtaggtggagtaggcgggtgcgaggatggcggtgccccaatcgcaggtcaggcgttccttgacggacttcagcgcctgctgcgccttgccgtcatcgaggccgatgccggccatcacgcacatgccctgcggttcgatgtagatctggccttcggtgtcctcatgcgtgccgaccttgcgcgagtaggcgtcgtaggcgcgcacgaaccattcgccgtcccagccggcggttttgacggccttggaaacctggccgatttcggcgcgcacgctggccgcctcggacgcgatttcggcgtcggacatgccggccagacgtccataatgctcgaggatgtcggcatattggctgccgtacagcacgaacatgccgccgatgaacacggattcggcgacgccggtgtcgttgttctccacggtctggaagctttcgcccggagtatcggagaaacagttgaggttcagacaatcattccagtcggcgcggccgatgagcggaatgccatgggggcccttatgcgtaatggtgaagttcactgaacggcgcaagtgctcaagtagcggctgttcggagccctcgacgttgttgaacggcaccggttcggtcagaatgctcacgtcgccggtttcggcgagatacgcgtacacgccggccacgagccacagcggatcatcattgaagccgccaccgatgtccgcattgcccttcttggtgagcggctggtactggtgccatgcggaaccgtcctccatttgggtggaggcgatgtcgatgatgcgctcgcgtgcgcgttccggaatgagatgcacgaagccaagcaggtcctggttggaatcgcggaagcccatgccgcgtcccatgcccgactcgtagtaggaggcggaacgggacatattgaacgtgaccatgcactggtactggtgccagatgttgaccatacggtcgagcttttcgtcgccggaatcgacgctgtaggtggtcagcagttcggaccagtaggagttgagctccttcaaggcggcttcgacctgttcgacggtggcgaaacggcggaacagctcatgggccggcttcttgtttatgatgccgaccttggccggatcgttcggatcctcccatttctggtccttggccacttcgatatagcccagcatgaacacgagcgatgcggtttcgcccggctggagttccagacgcacgcggttggcggcgatcgggaaccagccgtgcgccacggaatcgtgagccttgccttcggcgatgacctgcggggtgtcccagccgttgaactggccgaggaactcgtcgcggctggtgtcgaaaccgacgacgggcgcgttgacgccgtagaacgcgtaatggttgcggcgctccttgaattcggtcttgtggtacagcagcgtggcatcggtttcgcgttcgatctccacctcgccggtggacaggttgcgctggaagttggacgagtcgtccacggcattccacaggcaccattccacggagccggtcacgtcgatgacggccggctcgtcggtggtgttcgtcacgtcgagccgattgatttccgcattggtgtgcagcggcacgaaggcggtgagcttggattcgatgcctcgcttggaagcttcgaacacggtgtagccgatgccttgacggcacttgtaggaatcaagcggggtcttgcacggaaggaaggtcggcgaccaggtttcgaccggcttggcatcggcggaatcggagtccatcaggctcaggtaatagcagcgggagccgttgtctgccggcacgttgttataccggtagcgggtgacgcggcgtagtttggcgtccttgtagaagctgtagccgccgccggtgttggaaatcagcgagaagaagtccttgttgccaaggtagttgatccacggcaggggggtcgccggggtttcaatcacgtattcctttgcggcatcatcgaaatgaccgtagcgcatgggtgtcctttcgtcggtgaaatggctgtgacgaggtgtactgtatgggtatatcgtccattgatttaattaataggttagtacgttatttataaacttataaataacgatttgctggcgtgttgccgtcggtcttccaatggtcatctgtcgacgctgccgcaatcgggcagaggtcggggtatacttcctcccgttgccctcgtagctcagttggttagagcagcacccttataaggtgtttgtcctgggttcaagtcccagcgagggcacatgcggacctgccggaagcggcgggtcttttgcatatccgcggattgcagtccgtacgccctgcgtgtgacggcgcataccgtgtcccggccatcgcctacactccataaggttatccggttcacgccttgccatcggggcaatgcgacccgggtcccccgaatctctaggagacaaactatgaagcagggtatccatcctgattaccacgcagtgcaggtcacctgctcttgcggcaacaccttcgtcacccgttccacctacaacggcgatcacatgaccgtcgacgtgtgctccaactgccacccgttctacaccggcaagcagaagatcctcgacaccggtggccgcgtggctcgcttcgagaagcgttacggcaagaaggccaagtgagtcttattgcttaggcaatgaaaacgccagtccattcgtgggctggcgtttttcgttaccgacgtgccgtcgcctacctccgacgaccgcacttccgcgccaccttatatgatggacaggttgagtaaggttcagcgacgagtgattccgctgaagcgcagatacgaagaaaaggcgtacattggcagacgaacaattccccgcggccgtcaccgcgcttgaggaataccacaatatcgaacagcagatggccgagccggaggtcgcatccaatcccgacaagatgcgcaagctgggtcggcgccacgccgaactgggtgccatcgtctccgcctacaccgcatacaagcaggtgaaggacgatctggaggcggcccgcgagatggcgtccgaagatcccgatttcgccgaagaggccaagcggttggaaggcgagctgcccgcagccgaagagaagctgcgcaccgcgctgattccgcgtgaccccgatgacgcgcgtgacacgatcatggagatcaaggccggcaccggtggcgaggaagcggcgctgttcgccggcgacctgctgcgtatgtacatgcgatacgcggaaaagcgcggctggtcggtcaccgtgcaaagcgagaacaccaccgagctcggtggcgtcaaggacgtgcagctggccatccgcgccaaaggcactccggcgccggaggacggcgtgtgggcttccctcaagtacgaaggcggcgtgcaccgcgtgcagcgcatccccgtcaccgaatcgcagggacgtatccagacttccgccgccggcgtgatcgtcttcccggaagccgacgaggacgacgatgaaatcgaaatcgatccgaaagacctcaaaatcgacatcttcatgagctccggccccggcggacagtccgtgaacaccacgtattccgcggtccgcatgacgcacatccccaccggcatcaccgtgaacatgcaggacgagaagagccagatccaaaaccgcgcggcggcactgcgcgttctgaagagccgcctgctggccatgaaacacgagcaggaggccgccgaggccgccgatatgcgccattcccaggtgcgctcgctggaccgttcggaacgtatccgcacgtacaacttcccggaaaaccgcatcgtcgaccatcgcacgaactacaaggcgtacaacctcgacgccgtgcttgacggcgatctgcaggccgtgatcgacagcgacatccaggcggacgaagccgatcgtctcgccaaccagaagtaaggcgattgggtggcgacggtattcgaaacggtgcgttccgccgcggacgaactacgtgcggcgggcgtcgacactccgcagcacgacgccaaactgctgctcgccgaagcgttccatacggacctgcagcacgtagacaaagccatgctcatgggcgatggcgtcgaacgtctggccgaaaaagaagacgcggaaccggcgatggaacgtttccagaccatgctggcccgtcgtgtcaaacgcgagccgttgcagcacatcaccggccacgcgccgtttcgctaccttgatttgaaagtcggtccaggcgtgttcattccacgtccggaaaccgaactggtcgtgcaggaaggcgtcgactgggccaccagaaacggcatgtaccgcgccaaagtggtcgatctgtgcgccggcagcggtgcgatcggcctcgccttcgcttcggaagtgccgggcagcgaggtgtgggccgtcgagaaaagcgctacgaccgccgagtggacgcggcgcaacctcgacgagaccgcgaaacggtatcccgcaatcgccggtaattatcatctggacatcgccgacgccacgcaaatgccgacgttaagccaacttgacggcaccatcgacatcgtgctcaccaatccgccgtacgtgccgcttgccgacattcccgaacagcccgaggcgcgcgattacgaccccgatctggcgctatacggcggttcggcggacggcacgctcattccggaacgcatcatcgcacgcgcggcgaaactgcttcgcgcggatggacttatggtgatggagcacgacatcacgcagggggagcggcttgccgccttcgcacgaacctgcggcttcgtcgacgttaccgtgcataacgactacaccggacggccacgttatctgacggcggaaaaacagccggcacagtaacttatattcttttgcgccatgctgacggggatataaccagaagttgagtctcactataagaacattttatgcaggccgccatccgtcaggctataaagaacaatcggaatgcacagagagagaacgggcgtccgtcatgagtggtcgccgtggttccgcgcacgggggttgagatgaacatgattttttccaaggtgcgcgttgaaaggaatgtgcagcgttttcaagaaaagaggaagaacggaatgaacgcgaagttctccgccaagtgcgtcgccctgatcgcggcaggcgcaatgtcgatgtccctcgctgcctgctccggcggcagcatggacgattccagcagctccaacggtagcgcggccaacagcgataccatcacgctgggctccgtcaccaccaactccggcaccgccgccgcatacggcgaggccgaggtcgccggcttcaagctggctgtggatgagatcaacgccaagggcggcatcaacggcaagaaggtcaagctcgagtccatggacgacaagggcgacgccaccgaagcctccaacgccttcaacaagctcgccggcgacaacagcgtgctcggcgtggtcggcccgaccatctcctccaccaccgcggccgtggctccgctggccgaccagcccaagctgccggccatcgcaccggccgccacctccgactccatcgagaccggtggctatatgttccgcacctgcttcaaggactcctaccagggtgagatcgctgccaagttcgcagccgagaccctgaaggtcaagaaggtcgccgtgctgtacggcaccggcgatccgtactcctccggcgtgggcaaggccttcgccgctgccgccaagaaggccggccttgacgtcgtggccgaagagaactcctccagcgccgacgacaccgagtactcctcccagctgcagaagatccaggccgctggcgccgagttcctgtacgctccgtactactactccgtcgctggcccgtacatcatcccgcaggcccgctccgtcggctacaagggctatgtgatgggtcctgacggctacgacggcctgaagatgaccgacgacaagtcgctgtacaacaaggtgctctacaccacccactactctccggacgacacctccaacgccaaggtgcaggacttcatcaagtcctacaagaaggccaacaagaacgccgatccgaacaccttcaccgcactgggctacgactccgtgtacatgatgaagcaggccatcgagaaggccggcaagaacgccacccgcgagtccgtgcgcaacgccatcgccggcatgagcttcgaaggcgtgaccggcaacttcacgctcgacaagaagggctccccgaagaagtccgtcgtcgtgcttgagctcaaggacggcaagccgcagtacaagaccaccattcagcctgccaagtgagcgtcgcttgcctgaaggcctgaatctgtgaagaggaggggaccgggaaaccggttctctccctttcgcgtatcaagacgaaaataaccatattcagccgctgggcttcttcagcggccaagccggacggttatgtcaaaagtccggcatcatcaacttttgaaaggaggaatgatgggcgatcagatcatcatgttcatcagtcagatcttcaacggtctgaagatcggcagcgtgtactcgctcgtggcactcggctacaccatggtgtacggcatcattcgtttgatcaacttcgcacacggcgatttcatcatggtcggctcctacgtgctgatgcttaccattccggcgatcgtcgcgttcggcctgcccgcatgggtggccgtcatccccgcaatcctcatgtgcgtggcggtgggcgtcatcgtggagagggccgcatacaagccggttcgtgaaaagggcaacagcatgacggccctcatcaccgcaatcgcaatgagccttctgttggagaacggctcccaggccatcttcggcgccgactaccagaccgtgcccaccatcatccagattccgacgctggcgatcggcaagctgaagatcgacggcgcgaccatcatcaccatcgtgctcggcgtgatcatcatggtcgcgctgcagctgttcgtcacctacaccaagcagggcaaggccatgcgcgcggtctccgaagacaaggaggcctcgatcctgatgggcatcaacgtgaactccaccatcacgctcacgttcgccatcggttcgggcctcgccgccgtcgcatcgctgatgtactgcgtttcctatccgcaggtgtccccgatgatgggcgcgatgctgggcctgaaggccttcgtcgcggccgtgctcggcggcatcggctccatcccgggcgccatggtcggcggtctggtgatcggcgtggtcgaaagcctgaccaaggcgtacatcggcaccatcaccggcggtgtgatcacgtccgcgttctccgacgccattgtgttcggcatcctcatcatcgtgctcctggtcaagccgtccggcctgatgggcgaaccggaaaccgagaaggtgtgacctcatgaagaaatcaatgctttccaccaaacagtcctatctgatgtgcgcggtcggcatcgtcgtgctgttcggcattctgatgggtgtatgcgaatccggcatggccagcacctacatcaagggcatcatgatgacaagctgcatcgccatcatcatgaccacctctctgaacctcaccatcggcgtgctcggccagctgacgctgggctgctgcggcttcgaagcgatcggcgcgtacagcgcggccctgctgagcaagctgctcgtcgccaacggcgttgcgatggatccgacgctgcgattcctgctgacgacgctcgccggcggcgtggtcgcctgcatcttcggcatcctggtcggcattccggcactgcgtctgcatggcgattacctcgccatcatcacgctgggcttcggcgaaatcatccgcgtgatcatccagaacctgaaggtcgccggcggcatgggcctcgacaagggcgcggccggccaggcgctgatcggcatcgaccgactcgccaacctgtacgtcgtgttctggatcaccgtcgtcaccgtcgtgctgctgttcatgttcgcccgctcccgttacggccgtgccgtcaaggccatccgcgacgacgagatcgcggcaagcgcgtccggcatcaacatcacctacatgaaggtgctcgtgttcgctatctccgcgttcttcgcgggcatcgccggcggcatcttcgcccagtacatcggctcgctgaaccccgcgatggccggatggctgcaatcgatcaactacgtgatcatggtcgtgttcggcggcatgggctcgctgacaggttccatcgtctccgccatcgcgctgacgatcctgccggagctgttgcgcgccttctccacctaccgcatgctcgtgtactcggtggcgctggtgctcatcatgatcttccgcccgcagggcatcttcggcaactgggaattctccctgaccaagaccatcaacaagctgttctacccgatgaaggtcaaggcgcacggcaagtcgaagcaggctgaatccaccgccaaggcagccaaggacaccgccaagacggacgaaaccgctgagacgaccaccgacaccaaggaggcgcaggcatgagcgagcccatcctgaaagccgaacatctcggcatcaccttcggaggcctcaaagccgtatccgacttcaacatgaccatcaactccggcgagctcgtcggcctgatcggcccgaacggcgccggcaaaaccaccgtgttcaacctgctgaccggcgtgtaccagcccacggaaggcgagttcttcctggacggcgaacgcatgaacggcaagaagacatatcaggtggtgcgcgccggcatcgccagaaccttccagaacatccgcctgttcggccagatgaccgtggaggagaacgtgctggtcgcgttcaacgaatcgttcagctaccacatgggcggcgcgattttccgcacgccgaaattctggaagcaggaacgcgagatgcacgccaaagccatcgacctgctcaagatcttcggactagaaggcctggccgaaaccgaagcggcgaacctgccgtacggcgcccagcgcaagctggaaatcgcccgcgccctcgccaccggcatgaaactgctgttgctcgacgagccggcggcaggcatgaacccgacggagaccgaggacctgctcaactgcatcaacaccatccgcgaccgcttcggcatcgccatcctgctgatcgagcatgacatgagcctggtgatgaacgtctgccagcgcatccaggtgctcgactacggacgcaccatcgccgccggcacgccggaggagatcgccaacaacccgcaggtcatctccgcatacctgggctccgacgacgataccgacagcgacgatgccaagcacgaaagcgaggaagcctgatgctggaagtcaagaacctttccgtttcatacggtgccatcgaagccgtcaaggacatcagcttcaccgtcaacgccggcgagatcgtgtccctgatcggcgcgaacggcgcaggcaagaccaccacgctgcacaccatcaccggtctggtaccggcgaaatccggttccgtgatgtacaacggagtggatctgctgaaaacccacaacaacaagatcgtgaccctcggtatggcgcacattccggaagggcgccacgtcttcacacgcatgagcgtcgaagagaacctggagatgggcgcgttcagcctgaaggaccagtcggacctcaagaaggacctcgacatggtctacggcctgttcccccgtctgaaggaacgccgtaaccagaaggccggcacgttgtccggcggcgagcagcagatgctggcgatgggccgcgcgctgatgagccatccgaagacgatcctcatggacgagccgtccatgggcctgtccccgaagctcgtcaaggagatcttctccatcatccgcaagctgcacgagcagggcatcacgattctgctggtcgagcagaacgccaagatggcactgtcgatcgccgaccgcgcatacgtgctggaaaccggccgtatcacgatggaaggcgacgccaaggaactgctcaataacgagcaggtgcgcaaggcgtatctgggcgcctgattcgtgccgtatccgccttgtcggcttggacgcatccaaaccgacagggctttttctatatccgatggaatattcgccggtcgtgttcccaccattcgggcgcgccatcgagccatgccttacaataggtaagttgactggctgaaagggaggtgtcatgagcgagatttgcacagtaaacgacgaatcccttgcccgggccgttgaaatcatccatgatggcggattggtggtcatccccactgacacggtgtacggcgtcgcctgcgatccgcgtaacatcgaggcgatccgcaaggtgttcgcagccaaacaacgaccgaaatacaagtcgttgcaggtgttgctgccgtcaatcgaaagcatggagaagctgcatctgaccttgccggtgccgctcaaccgtctggccgccatgttcatgccgggcgctttttcgccgatagcggaagcggaagacgactgttcgcttgccacgttgcgtcatgatccgacaaccggcaaagccacacagggcgtgcgcatccccaattccgcggtcgcgctgcgtattctgcgagccaccgggccgttggccgccaccagcgccaaccgttccggcgaggaaagcgcacaaacggtgcaggaagccgcggacgcgctgggagatgcggtggatctgtatttggacgggggagcgactccgggacatgtatcgtccacggtggttgcagccgacccgcacgagcgcgacggcatcgcgattcttcgggagggagtgattcgcgagctggtcatccgtaaggctttaacactgaatggcggtgctttgggcgcatgagaatctacctgttcattgccgcggtcgcaggtggcgtcacctatctgctcacgccgctgatccggcacatcgccatcgaaatcggcgcagtcggcgaagtgcgcgcacgcgacgtgcataccgtgccgacgccacgcatgggtggactgggcatgcttatcggcttcaccgtggccatgctgttcgcctcgcgcatccctttcatcgaaggcctgttcgcccaatcgcatcaggcatgggtgattctcgccggcgccattatgatcagcctgctgggcatggccgacgatttgtgggaccttgactggatgctcaaactcgccggtcagctgctcatctccgtgtttgtggcctggggcggcctgcagatcatctcgttgcctctcggctcgctcgtcaccgcgtcgccgagcctgtcgatggccatcaccgcgttccttatcgtcgcgtccatcaacgcggtcaacttcgtggacggtcttgacggcctcgcttcgggcatcgtcgcaatcggcggcatcgccttcgccatctattcgtacatcatcgcaagaagctcgccgtcgtacgcatccatggcaacgctgatcgacatcgccatggtcggcacctgcgtcggtttcatcctgcataactggcatcccgcaaaactgttcatgggcgactccggttccatgctgcttggctacctgatcacctgcgcgtcgatcgtcatgaccggccgtctcgacccggcatccatccacgccagcatctacctgccggtgttcatgccgattctgctgccgatgctcgtgctgttcctgccgattctcgacatgtgccttgccatcgtgcggcggttgagcaaaggccagtcgccgatgcatcccgatcgcatgcacctgcaccaccgcatgctgcgcatcggacacaccgtgcagggcgcggtgctgattctctgggggtgggcgtcgctgattgcattcggctcgatcatgattctgttcttcaaagcgcagtatgtgctgattggcttcctcattgcggcggcgctgctgacggtcgccacgatgtacccgtatctgaaacaccgcattcccgaaatccgtgaggaaaacgcaatctccggaaccgatgcgcaacatgcgtcggtcggacgcgcgcgcggcgacaaaacgcgcggtggacgctgatcgtccgtccggcgcaatcgcaagaaaaactgatgaaacgctttgccaaacgatataagcagcttttattacgattgataatttcggcttttcgcgccgtgtcgcagtaagtcagcccacgttcatatagtgggtctatggctacaattcctgatatgaatgcagattccacgttcgccccactccctccgattttcgcccagcttggcctcgcctatgacgatgtgctgctgctgccgaacgagacggacgtcattccgtccgaagtggacaccaccacccatctcacacgcaacatcacgatgaaggtcccggcgatctccgccgcgatggacaccgtcaccgaatccgacatggccatcgccatggctcgcaacggcggcatcggcgtgctgcaccgcaacctttccatcgacgaccaggccgcccaggtcgacatcgtcaagcgttccgaatccggcatgatcagcgatccgctcaccgtgagcccggacgtgaccctcgccgacctcgacaagctgtgcggccgtttccacatctccggcctgccggtcgtggacaaggacagcaagctcgtcggtatcatcaccaaccgtgacatgcgtttcatcgcttccgaggattacgaccgtttgaaggtctccgaggtcatgacccgcgagaacctcatcaccggtccgtccgacatctccaaggaagacgcgcacgacctgctggccaagcacaaggtcgagaagctgccgctggtcgacgccgaaggccacctgaccggtctgatcaccgtcaaagacttcgtcaagaccgagcagtacccggacgccaccaaggatgagcagggccgtctgcgcgtcgccgcaggcatcggcttcctgggcgacgcctacaaccgtgcttccgctctgatggaagccggcgtggacgtgctcgtggtcgacaccgccaacggtgaggccaagctggctctcgacatgattcgccgcctgaagtccgattccgcgttcaatggcgtggacatcatcggcggcaacgtcgccacccgccagggcgcgcaggccatgatcgacgccggcgtcgacgccgtcaaggtcggcgtcggcccgggctccatctgcaccacccgcgtggtcgccggtgtcggcgtcccgcagctcaccgccgtgtacgaggccgcccaggcctgccgcgccgctggcgtgccgtgcatcgccgacggtggcatccactactccggcgacatcgccaaggccctcgtggccggcgcatcctccgtgatgctcggcggcaccctcgcgggctgcgaggaagctccgggcgagaaggtgctcctgcacggcaagcagtacaaactgtaccgtggcatgggctccctgggcgccatggctccgcgtggcaagaagtcctactccaaggaccgttacttccaggccgacgtcacctccaacgacaaggtcgttccggaaggtgtcgaaggcgaagtgccgtaccgcggaccgctcaacgccgtgctgtaccagatgatcggcggcctgcaccagtccatgttctacattggcgcgcacaacatctccgaaatgccggaacgtggccgcttcatccgcatcaccgacgctggcctgcgcgaatcccatccgcacgacatcgtcatgaccgccgaggcgccgaactactccggccgtcagtgattggcgaataccgcgcgaaacgcatacgacgcgactaaacgctagataatacgaaacccgtccggtggcaggaatgccgctggacgggtttcgtgcgttttcggcagctattggtctagtgacgtttagttaattgagccatgtcgatggcaccgtatgaacgtcaacttacgcgttccgtggtgccacgcagcaccagcgacgtcggcatgacggtgaacggctcgtcaagcgtctcgccattgagcagcgcaagcgtcttacgtgcagcgatacggccgatttccgccggatcctgatgcatggtggtcagatccaatgcggtggcggtgtcgttatcatcgaatccgaccagcgacacgtcctggggcacgcgccatcccatgcgtcgcagctccttcagcaggggagcggccacggcgtcgacggagacgcagatggcggtcggctgctttggagcgctgagcagctgcgcgacgatgccggaatagatgtcctgctcgctgcgagcatcgatatgggatagtgacggcatgacgatgatgtcactatccgcgtaaccgcaagcttgtgaggcttcgctgaatcccttcttgcgcagcctgtcggagcagacgaacggcgtggtgttgatgggctgttcgatgtaggcgagcgtcttatgccctaacgatttgaggaaccgtacaatcgtcgccatggaagcctcgtcgtcgatggcgacgccggcgtcgagaccgtgcgtgctcggcgcgttcatgccgaccaccggaatggtcagatcgccaagcacctgcttcttcgcctcgtcgaagtcaaatgacgcctcgatgaccgcgtcgacgttgcggttgcccggaagattttggaaaaacgcatccaaatcgtcctgcgtccacacgatgtaaggaacgatgtcgtatccggccttcgacatcacctcgtaaatgccttcgaaggcgtgggcgttgaaccagctgctgatttcgttcggcagcagcacggcgactcgcatggttttgccggacgccagggacgacgcgcttttcgaaaaggagaaatgcaggcgcttcgcctcctgctcgatgcgttccctggtttcgggactgaccctgtcgagcccgcgaagcgcgcgggacacggtggagacggacactccggctgcctgggctacgtctgcgatggtggttcgtggcatggtcggatggctccttaaggtggactatgcgggcggtcggttgcccgcgactgcttcactctatcacgacacgctgcttttgtaaaaacgtttgcatggcttcgggtgttgttattgctggctttttgaagtgctgccaccttgttctgcctcctgtggtttgcgcttttttgcacaagcgttattattgattatgtcaagcaatgcgataacagcaacgaagctacacaacgcaacataaccatcgtaggaaaatcaacgaaaatcgttctacgtacggagttgtgatacgtgcgcacggtgcacaagcgtttgtatgaaaggggacaacatgaccgaagtcaacgatccgtcgctgtggtggaagcaggccgtggtctaccaggtgtatccacgttccttcaaggattcccgcggcgagggcctcggccagatcgccggcgtcaccgagaaaatcgggtatctgaaggaactgggcgtcgacgccatctggctgagcccgttctacccgtcccagctggccgacggcggctatgacgtggacgactaccgcaacgtcgatccgaaactcggcaccatggacgatttcgacgcgctcgccaaagccgcgcatgccgacggcatcaaaatcgtcgtggacatcgtgccgaaccacagctccaacctgcacgaatggttcaaggccgcgttggccgcgaaacccggctcgctggaacgcgaccgctacatcttccgcgacggcaagggaccgaacggcgacgagccgccgaccaactggcagaaccacttcggcggccctgcatggacgcgcgtgcccgacggccaatggtatctgcacatgttcaccaaggaacagccggactggaactggaaaaacgaggacgtgcgcgccgatttcatcaaaaccctgcgtttctggcttgaccacggtgccgacggcttccgcgtggacgtggcgcacggcctggccaaggatctcgaccgcgatgatctggacgattatgtggtctggtgcaccaacgatcagcccgaagacggctcccatccggtgatcgaccgcgacgaagtgcacgacatctaccacgagtggcgcaaggtgttcaacgagtacgatccgccggcgttcgccgtggctgaggcgtgggtccgaccaagccgccagcatctgtacgcctccccggacgatctcggccagatcttcaacttcgagttcgccaagaaggattggatccgcgacgacatgcacctcgccatcgaggaaggtctggaaagcgccgaacggtccggttccaccgccacttgggtgatgagcaaccatgacgtggtccgccatgccacccgctacgcgctgccccaggtgccgaccggcgaataccatcgactgccgctcgactggctgctgcgcgacggcaccacataccgggaggaccgcgcgctcggcaccaagcgcgcccgcgccgcgatcatgatggagatggcgctgcccggctccgcctacgtgtatcaaggcgaggaactcggcctgttcgaagtggccgacattccgtgggatgagctggaggatccgtccgcatggcgcacctcccgttccgccagcaccaaaggccgtgacggctgccgtgtgccgctgccgtgggttgcggccgacgctccgcagctggacgatccgaacgatgagttcggccatggcggctccttcggattctcgccggcagacgcgaaggccgagccgcatctgccgcaacccaagtggtacaaggatttcgcggtcgatgtcgaatcggccgacccggattccatgctgaacctgtaccgccgcgtgctggcattgcgacatgagttgcagaccaccgacctgagtctcgaatggcttccggaagaccagcccggcaaggcgcatgacggcgccaacggtttcccgggtggcaccatcgcgtaccgccgtgccaacggctgggcctcgatcaccaacttcggcgaagaaccgatcacgttgccgcaaggcgaagtgctgctgacatcaggaccgcttaccgacgatggcaagctgccgcaagataccagcgcttggctcaaactggccgattgaccgcacgcaggatgccccgatctgagggtgtccgtgccggataccgcactcgtgcgctgaaccatcgaaccggcagcgcgctccagccgtccgcgtccctccatttgggcgcggacggctttcctgtttccaacgaccgttttccaacgatgacggtccgacgtacctaccctgcggtatcttcatatgttcggcctgcgcagagggcgcgaccgcggaccaatcgaaagaggcaacgatggtagatgcacacgatggcgaaacatacacgtccgaaggctcacgtctgatctggatcgactgcgagatgaccggcctggatatcttcggcggcgacgagctcgtcgaggtttccgtggtgccgaccgacttcgacctgaacgtgctcgacgaaggtgtcgactatgtggtcaagcccagtcagaaggccgtcgaccacatgaatgacttcgtgcgcgccatgcacacccgttccggcctgatcaacgaatgggaacacggtctgagcctcgacgaagcgcaagccaaggtcatcgaatacgtcaggaaattcactccggccggcgtcaagccgctgctcgccggcaacaccatcggctccgacaagaagttccttgaccactacatgccggaactcatggagaacctgcactaccgcaccatcgacgtgagcaccttcaaggaactcgcccgccgctggtatccggccgtctacctcaaccgtccgccgaagaacggcggccaccgcgcgctcgccgacatcatcgaatcgctcgacgaactgcgttactaccgcaaggcgttcatggccccggtgcccggtccgagcgaagcggaggcgaaggccatcgcctctgaaatccaggaaaccagcctgctcaacaaggactgacagcacgactccagcgagaggaaccgcatgaccgcagctgattggaccaccatcggccaaccgcaggatatccgccttgtggtcgccgacatggacggcacgttacttgacggacgaagccgaatccccgacggattctggcccatgctcgcccggctcaaacgccgtggcgtcgaattcgtgcccgcgtccggacgccaatacgccacgctgcgcaacatgttcgccgacaaagccgcggagattctcgacgggggagaactgtcctatatcgcggaaaacggcaatgtggtggcgctcgacgacaaagtcgtggaagtgcatggcgtcgatttggacgtcacgcgtcacgtcatcgacctggtcgccgacgccgctgcctccggcgagcataacgtgggactggtggtgtgtggcctcaaatcggcatacgtgcagcgttccgacaagccgttcctcgatgaagtcggcaaatactacgcggcgctgagcatcgtggacgatctgcacgaagtgctcgacttcgcgcaggaaccgtccgcctacacccctgacggcgacgccgaaatcgttctgaaactcgcgatcctcgaccttgacggctccgaacgattcaccaacgaaaagctcacacatctgcgcgcggactaccaggtggtcgtctccggcaaactgtgggtcgacatcatgaacgccgaaaccgacaagaagcagggcgtcgaggcgttgcagcgcgtgctcggcgtcacgcccgcgcagacggcggtgttcggcgactacctcaacgatctgctcatgcttgaggcgggcgactggtcgttcgccatgggcaacgcacaccccgatttgaaggccgccgcgcgctacatcgcaccgtcgaacgtcgagcacggtgtgctcaaggttgtggacaggctggttgcctgacgatttcgttgcatggggcgcggtgacgtaaagaaggtggcgtaatgaggcaatccgaggcgcttgcgattctgggttccggcgcaagcgtgttcctgacgggcgcgcccggtgccggcaaaacctacgtgctcaacgaattcatacggcaggcgcgtgccgacggcgcatccgtggccgtcaccgcatccacgggcatcgctgccacgcatatcaacggcaccaccatccattcctggagcggcatcggcttggccacggcattgaccgacaatctggtcaaaaccgttcgcgcacgccgcaaacgcaagctgcaggaagccgacatcctcatcatcgacgaggtctccatgctgcacgcgtggctgttcgacatggttgaccggatctgccgcatcatccgccgcgacgaacgtccgttcggcgggctgcaggtggtgttgtccggcgattttttccagctgccgccggtttcggtatcgggacgcaacaacgacctgatcgcgccgtccgccgaatatctggccagtcgcgaacggtacatgcgcgccggactcaatcccgaaggtttcgtcaccgaatcgttggtgtggcgcgaattgaaccccgttgtctgctatctgaccgaacagcatcgtcaggatgacggccagctgttgaacgtgctgaccgacatccgcgaaggcgcggtggacgatggcgaccgcaatgtgctgctgacccggttgggggccattccggaacccggacagcaggcggtgaacctgttccccgtcaacaggcaggccgacgcgcttaatgacctgcgcctgttcgaaatcaaggaggagccgcacgaatacctcgccgaatccgagggcgcggcgaatctggtggaacggctcaaaaagaacatgctcgctcccgaacgcttgtacctcaaaacgggcgcggccgtgatggcggtgcgcaacgacaccgaccgccagtacgtcaacgggtcgctcggcaccgtgcgtggattcaccacgcaatcgcagggcggctggccgatcgtcgaattcgaaaacggcaacatcgtcaccatgaagccgaattcctggcagatgcaggacggcgataccgtgctcgccacggtcaaacaggtgccgttgcgctgcgcgtgggcgatcaccatccacaaatcgcaaggcatgacgctcgatcgtgccgtcatggatttgcgacgcacattcgcgccgggcatgggatacgtggcgctgtcgcgagtggaagggctcgacggcctgtatctgcaaggcgtcaacgagcgcatgttcctggtctcaccggacgcggtccgtcttgatggacaattgcgattggagtcggctcaggccgccgatacgcttgcctccgacggtgtcggagcattccgcgcccgcatgccgcaaccggccggtgaggatgacgaattcgcgcaggacgtgctgttctgacccgctgctaaatatcagcccatcgcctgcagggaacgcgcaagatccgggtcgagctcaacttcgtcctcgacgctttccggatcggggtcccaacagctggcgatcacgcaagccagtccgacgagcaaccaaagcgggttgcgctgcaggaactcaagacctggaatcgcccgcgtgacgatgatccatatcaccatgccggccagcgcaatcgcattgaacggcttcttccatggcagggaaatcaacgtgacgcacaatacggccaggcacaggccgatccattggttgccttcggtcagcacttccggcgctgccgccgcgaagacgaaatagcagatgatgccgatccagccgagtttgttccaaatcgaaatgtgcgcggtgacgtgacgcatgctgcgtcctttccttatgaagcgatatggtgctgattccagtatcatagaaacggctttagacttatttataactctataaataacgtttttcgcgtattggtgtgcgattcgaggacgtgtggcgcatccaagtcggcttacctgagtaatttggaacgtatgaccaaagcacttcgtatgtctaccatgttcctgcgcaccctgcgcgaggaccccgccgatgccgacgtcgtgtcggacaagctgctgcagcgcgcctgctacctgcgcaaggccgctccgggcatctggacctggctgccgctgggcctcaatgtcctgaacaagatcgagaacatcatccgcgaggagatggcgtccatcgacgcccaggaagtccacttctccggactgctgccgcgcgagccgtatgaggccacccaccgctgggaggaatacggcgacaacatcttccgtctgaaggaccgtcacgaggccgactacctgctggccccgacccatgaggaaatgttcaccctgctggtcaaggacctgtactcctcctacaaggacctgccggtgaccctctaccagatccagaccaagtaccgcgacgagttccgtccgcgcgccggcctgatccgcggccgcgagttcatcatgaaggacgcctactccttcaccctcgacaaggaaggcctcgtcaaggcatacatggacgagcgcggcgcatacgagcgcatcttcaaccgtctcgacctgaagtacgtgccggtgcacgccatggccggcccgatgggcggcttcgaatccgaggagttcctggctccgatggagatcggcgaggacaccttcgcccagtcgccgtccggcaaggcctggaacgtcgaggcgctgaccactccggaaccggaagccatcgactttaccgcaacgccggcagccgaaaagcgcccgaccccggacgcggccaccatcgacaagatggtcgaattcgccaacgccaaccatcctcgtttcgacggccgcgattggcaggcctccgacattctgaagaacgtcgtcatcgccgtcatgcatccgcaggacgaagaccacgacgagccgtggcgcgagctcgtggtcgtaggcgttccgggcgaccgtaccgtcgacatgaagcgtcttgaggcgcagttcaccccggccgagatcgaggaagccaccgacgaggatctgaagaagcatccggaactcgtcaagggctacatcggaccgatggcgcttggcccgcaggcgcgcgacggaaagaaggccgagaacgcgtccgagaccggtgacgcgctgcgctacctgatcgacgcgcacgtggcacgcggttccgcatggttcaccggcgccgacgagcaggacgtggattactacgatttggtgtacggccgcgatttcgaggccgacggcaccgtcgaagccgtgcaggtacgtcatggcgacatgagcccggacggttccggcccgctgagcttcgagcgcggcgtggaaatcggccaggtgttccagctgggcctcaagtattccaacgcgctcggcctgaaggtgctcgaccagaacggcaagaccgttccggtgtggatgggctcctacggcatcggcgtctcccgtgtgatggcctgcatcgccgaaacccatcacgacgagaagggtctggcgtggccggcagtcatcgcgccggcacaggtgcacgtcgtggccaccggcaaggatgcggccgcgttcgaagccgcagaacagctgatcggtgagcttgaggccaagggcatcgaagtcatcttcgacgaccgcaagaaggtgtctccgggcgtcaagttcaaggacgccgaactcatcggcgtgccgatcatcgccgtcgccggccgcgacaccgtcaacaacggcaccatcgaagtgcgcgaccgcaacggtgagaacgccgaagcggtgccggtcgcggacgccgcgcaggcgatcgcggaccgcgtcgctgcactgctcaagtgacatacggcaatccgtagcgcgtcggtttgatccgacgaacgacatacggcaacggaagaccatcaagcaggtggtcttccgttttttgtttttcatggggaataccgtgcgcatctcacgcacatgaggattgtggatgtcggtggataagtcgaaattatccaccgacaatccacgactcgcccgacgatctcaagttatccacattctccggttgggcttgcagacggatggaacgttcggcgatagtggtcttaccgcggaaacgtgaagatgcgggaagggcatgcagtttaccctctctcaccataaatccacctcactgcctgtcgcttccgtgccgtcaacggcgctttccgcggtccatcattcgtcaaacagaaaggaccgaacatggcgcagcagcagggtctcctcaccatcacgggatatgtgggcggccagcccacgcaattcaatcgggaaggcatgccgcatgccagctcattccggctggctagcaccagacattatttcgatggccgaacgcaacagtggaaggacctgcccaccacatggatcacggtgaaggcatatcgaggcctttccgaaagcatctgccaatcgttcaaaaaaggcgaaccggtcatcgtgaccggcgtgctggcggcggaaagctgggtggaccagaacggcaagcaacagtcgaaactcgtcatggaagcgaatgcggcggggcatgatttgagctacggtgtctccaccttccgcaaactcgccaagaaaaacgattccggccagcaagacgcgcagcctggacaggctttaggacgtgatccatatgtgcaagccgcccaacagcggggcgaaacttcagtcaatgcgatggacgggcagagttccggcgttgacgagcaaggcggctcgcaggccggtacggatagcaacgccgccgaacccctacgtgaggaattcggcggcgatggcttctgacgattgcctgacgcttatgcgatcgctggcatggcctgttaccagatgcgcacgcgttgctccggtgcgagccacatgccgtcgccgggctgcacgccaaacgccttgtggaacaggtccacattacgggcgatgccgttcgtacggcattcggcgggggagtgcgggtcgatctgcagatactgctccgccaactcgtcgcgattcttagtgcgccaaatcgaagcgtagctcaggaagaaacgctgcaggccggtgaagccgtcgatttcaggagcatcggcaagcgcggcttcgatggcttccgtggaaccatccttgccgcggccggccgcttcatcgagagcgaacgcataggccttgagagcgatgttcacaccgctcaaatcgccgatgttctcgccgatggtcaacgcgccgttcacatgaggggccttcgacgggtcatccgaatacttttcggcgagctgcgtcggcacgaactcgttgtactggtcgatgagcttctgggtgagcgccttgaaattggccttgtcctcttcggtccaccagtcgttgagtttgccgtcgccgtcgtattgcgagccctggtcgtcgaaaccgtggccgatctcatggccgatcaccgcgccgatgccaccgtagttcgcggcatcctcggcatccgggttgaagaacggcggctgcaaaatggcggccgggaacacgatcacgttcatggacggctcatagtaggcgttcaccgtctgcggattcatcagccattcgtccttgtcgacggccttgcccaccttggccagctggtagccggtctcatacaggttcgcggcacgcatgttctgggcgaagccggcgtcctcgcgcacatccagcgcggaatagtcacgccaatggttcgtgtagccgatcttcggcacgaacttggacagcttctccaatgccttggccttggtctcgtcgccaagccaagtggaattggagatggacacacggtaggcgtcgatgagattgccgaccagctgctccatacgctgcttggaggtttcggggaagtgacgcttcacgtattcgcggccgacatcctcgccgcagatgccgttgaccagcgagacgccacgcttccaacgcacacgctgctccttctgcccggacagcgtcttgccgtagaagtcgaaattcgtttcgtcgaattcgtggggaagctccaatgtggagccgatcaccacatgcacgcgggcccacagcttgagatcatccagcgacgcttccttccagaacgcgttgagtccggtgaggaagcttggctcatgcacgatcgtgtggctgaaacagccgcggaaatccaacggctgcacggcagccgcggtggtcgcgtcgtaagcgttctgccaggcgtcgatccaagcgtccaggtcaacatcggcgagcatggcgcacaggtcggcgtaatccgtcgggttataggtcttcaccgaatcgcgcgtggacacgttgtcccaatggttcgccgcgatgcgcgtctccacgtcaaggaaacgcttggcctgcgcatgggcatcctcgtcatcggccgcaagatgcgcgttcttcagctgcttggcgaccatctcgacatacgcctcacggattggcgcgtaatggtcttccctgtagtaggcctcgtccggcagatccaaaccgtcctgttcgatgtgcacgacattggtctccggcgctcccggatctccgtaaacggcgatgccgatcaggtctggaccgccggtcgggttcatggcgccaagcgcgcgggtgagtgcggccttgtcttcggcctcgtcgatggaagccaactggtcttcgatggcggcgagtccggccgcgtcgatggcatcgacgtcaaggaaactatggtacaaagcgcgcgacttgacggctgggcaatcatcctcttcaaggatgtcgcggatctggttttccgcatcctcggcgagcttgtcgaaggaaccataccgggaacggtcgtcgggaagacggtacatgtcgacccacgggccgttgacgaagcggaacaagtcctgagacgggccggtcacggcggagaacgatgccggatcgatacccgaaaccaaagaattcgaagtgttgttcatggtttcacactatccatctttggtgacaacatcgtgtattcgaatcgaatattcggatggaacgcaaggtggaatacagaaaggagaacatcgttcgccggtgtatggcccgcgaagtagggttgaaggcatgatcgaactgaaaacccctaaagagattgaagcgatgaagcccgcaggccgcttcgtcggcggcatcctgcgcgacctgaaggaatttaccaaggtcggcaccaatctgttggaaatcgacgaattcgtccacaagcgcatcgtggaccgcaagggcgcctcgtcctgctacgtcgactatgcgcctgatttcggcaccggtccgttcgcgcactacatctgcacgtccgtgaacgacgccgtgctgcacggcgttccgtacgactacaacctgaaggacggcgatctggtcagcctcgatctggcgatcaacgtcgacggatgggtcgcggattccgccatcagcttctgcgtcggcacgcagcatcccgacgacctgcgcctgatcaagtgcaccgaagaggctttggcggccggcatcgaagccgctcagccgggcaatcgtctgggcgacgtctcctgcgccgtcggcgacgtggcacgcgaatacggctacccgatcaacctggagttcggcgggcacggcgtcggccatatcatgcacggcgatccgcacgtgccgaacgacggcaaggcgcatcacggctacaagctgcgtccgggcctggtcatcgccatcgaaccgtggttcctcaagaccaccgacgagatctaccaggatccgaaggacggctggacgctgaagagcgaggacggctcccgtggcgcacacagcgagcacaccatcgccatcaccgaaaacggtccggtgatcctcaccgtccgtgactagtccaaaaccttatgaaaacgggcttgtgcgattacgcacagcccgttttttcatgcccgttttgagacggaacccacatatcgaaacgcgcatgccatatagtgggcggtactttttgaactggtaaggagcgaacgagtatggccacagccaatctgagtgtggaatccaaggacttcaccctgccggtggtcgaagccacggcgggcgcggacggcatcgtggtgtccacgctgcgcaatgatggctgggtcacactcgaccccggtttcctcaccaccgcgcaatgcgaatcgaaaatcacgtacatcgacggcaagaactcgattctgcgctaccgcggctatccgatcgagcagctgtgcgaacagtccgacttccttgaagtcgcttggctgctgcgtcacggcgaactgccgaacaaggaccagtacgaccgtttcatctccgacatcaaccaccgcacgatggtgggggaggacttccgtacgttcatgggctccttcccgcgcaccgcgcatccgatgagtgtgatggcgtccgcggtcaacgcgctcgccacgttctacccggacaccacggacatcaacgattccgaccagctggacgaagcggcgaccatcatcatggccaaggcgcgcaccatcgtcagctacatcttccgccgccgtcgcgatgagccgatgctgtacccggactactcgcgtggctatgtcgacgatttcctgcgcatgtgcttcgccgtgccgtatgagccgttcgaatccgatcctctgtacgtgcacgcgcttggccgtctgctcatcatccatgccgaccacgagcagaactgctccacgtccgtggtgcgcatcgccggttcggcgcacgccaacctgtattccgcggtcgcggccggcatcaacgcgctgtccggcccgctgcacggcggcgccaacgaggcggtgctccgccagctcaaggccatccgcgactccggcaaaaccgtcaaggaattcgtggaggacgcgaaggccaacgggcatcgcatctccggcctcggccaccgcgtgtacaagtcgtacgatccgcgcgcggcgatcgccaagacctatctgcagaagattatggaacgcgccgacacgctgaagctgccggcggacgagcgcgcgctgttcgacgtggccaccgaactggaacagatcgcattgagcgacgattacttcgtgtctcgtcatctgtatccgaacgtcgacttctacacgggactgatctaccgtgcgatcggcttcgatccgtccatgttcaccacgctgttcgcgttgggccgcatccccggctggatcgcgcaataccgtgagatgctcgccgatccgaacacgaaaatcggccgtccgcgccaggtgtacaccggctacacggaacgcgattacgtgccgatggaccagcgccactgaacgatattgacacgcggctccggtttcggacgtgcgcatgcgcctgccatggcttgccgctacagtgtttcaaggaacgaaagaacctaacgaatcgctggaaccggtctacggctccggcatggtcaaaggagcgtacacatgactgaacagcgcaccgcatggggttggggcctggcaagcatcgatgcggccggcaacacccttgacgtgtggtatccggaactcacgttgggcgaggctccggctgaaacctcgcgtccgaatcacaacttcggcgccatcgcgcatgacgaggccgacgcgcgtggcgtgcgccgcatgcccgtgttcaccgtgtccaagctggacgagccgatcgaggacgccgccgacgcctatctgcgtctgcacctgctgagcatgcgtctggccaagccgaacacgttgaatctcgacggcatcttcgccaagctcaacaacgtggtgtggaccaactacggtccgttcgccgtcgacgatttcgctttgcgcaagcttgacgtgatggccgccacccgacagtccggagccgtgttggcgccgcacgtcgatgtgaacgtgctgtcgattgacaagttcccccgcatggtcgactacgtcgtgccgaccggcgtgcgcatcggcgacgccgaccgcgtgcgactgggcgcgcacctgtccgaaggcaccaccgtcatgcacgccggcttcgtgaacttcaatgcgggcaccctcggcgtctccatggtcgaaggccgcgtctcgcagggcgtcgtggtcggcaacggctccgacatcggcggcggcgcgtccatcatgggcaccctgtccggcggcggcaagctcaagaactccatcggcgagcactccctgctcggcgcgaacgccggcatcggcatctccctgggagacaactgcgtggtcgaagcgggcctgtacgtcaccgccggcaccaaggtcaccatctacgacaaggccaaggtcgccgccggcgaaccgctcgaaaccgtcaagggcgccgaactgtccggcaaggacaacatcctgttcatccgcaactccgtgtccggccgcatcgaggcgcgctaccgcaagaccggcatcgagctcaacgagaaactccacaagaactgaaaacggaatggcggagagcgtcatccgcgctctccgcaagaggaaactcgtgaaaatcacactgatcaccgtcggcaaggtcaaagagaagtatctgcgcgacgccatcgcggaatattcgaaacgactgggccggtattgcaagctcgacatcgtcgaagtggccgacgagaagacaccggagcatgccagcgacggactcgaacggcagatcaaggccaaagagggcgaacgcatcgccaaacatattcgtgacgatgcgttcgtcatcgccctcgccatcgaaggcaagcagctcaccagcgaacagctcgccgcgaaaatcaacgacctcggactccacggcaccagccatatccaactcatcatcggcggctcattgggactcgaccccgcgatcctcaaacgagccgactacctgctgagcttttccaaaatgacgttcccgcaccagctgatgcgggtggttctgctggagcagatctatcgcgcatacaaaatcaacgccggagaaccttaccacaagtgattttcgaggcgtttcgcaagaaacgctaagtaggggcgagccggtatagtggcgcgtatgagtgactacagggacgaacgcgagcagcgagaacgccgtcgccgcaccatggtgcgcacggtgtgcatcgtcatcgccgcggcgatgctgctgagtctggtcattcctgcgatctacgcggggctttgacgccttcgggcccgtatgatccgaaacgggccccggtttcccgtatgcgtgcggacaggttcgcggtccgtccatgtgggaaatggatgtgggcacgtggaaaaaccttatggattgtgcgggagccgtggacggctccatgtcagaatagtcaggaacgtaacagaaatgtatggtgtaaacgatggcagaatttgattactccgaggcgatcagcgaagcgcgcgccaaatacgagtccatttccaaggccctcgacgtcgatcgactgaccgccgaggccaaggaccttgaagtgaaagcggccgaacccggattgtgggacgatccggaaaacgcacagaaagtgaccagcaagctgtctgcggtgcagtcgcagctcaagcgtctggcatccgccgaccagcgcatcgaggacgtggagaccctggtcgagcttggccaggaggaagaggacgccgacacgttggccgaggcgaaggccgaagtcgaaagcatccaaaaggatctcggcgatatggagatccagacgctgcttgacggcgaatacgacgaacgttccgccgtggtgacgatccgttccggcgccggcggcgtggatgcggccgatttcgcgcagatgctgctgcgcatgtacctgcgttgggcggaacgcaacggatacaaggccaaggtcatggacacctcctacgcggaagaagccggcatcaagtcggccacgttccaggtggacgccccgtacgcatacgggcgactgagcgtggagggtggcacccaccgtctggtgcgtatctccccgttcgacaaccagggccgccgtcagaccagcttcgccgccgtggaagtggttccgctggtcgaagcgaccgatcacatcgacgtgccggattccgaaatccgcgtcgacacctactgctcgtccggtcctggcggacagggcgtgaacaccacgtattccgcggtgcgcatcacccacatcccgaccggcatcgtggtgaccatgcaggacgaacgctctcagattcagaaccgcgccgccgccatggccgtgctgcagtcccgactgctggtgctgcgccacgaggaggaagccaagaagaagaaggagctcgccggagacatcaaggccagctggggcgaccagatgcgctcgtatgtgctgcatccgtaccagatggtcaaggacctgcgcacggggtatgagacctcgcagacccaggctgtcttcgacggcgacatcgacgagttcatcgaagccggcatccgctggcgtcacgaacagcgtcgcgcggcagccgaggaacaagaagcctaagcgataggcggagggaaaacacgatggcgctgatctcgcttgaacatgtgagcaaagtctatccaaagggcacgcgtcccgcattggatgacatcaatcttgacatcgatcgaggtgatttcgtctttcttgtgggcgcgtccggttccggcaagaccaccttgctgagcctgctgcttcgcgaggaggaagccacggatggcgagatccgcgtcgccggcaacgatctgcgacgcctgtccgcacggcaggtgccgcattatcgccggcagatcggctttatcttccaggattacaagctgctcaacaacaagacggtatgggagaacgtcgccttcgcacttgaagtgatcggcacaagccgttccaccatcaaatcgctggtgcccaaagtactgcagacggtggggctcacgggcaaggaaaacaactacccccatgagctgtccggcggcgaagcgcaacgcgtcgccatcgcaagggcgtatgtgaaccatcctcagatcctgctcgccgacgagcctacgggcaacctcgacccgaccacgtcgctgggcatcatggaagtgttggacgccatcaaccgtaccggcaccaccatcgtcatggccacacacaacgaggagatcgtcaactccatgcgcaaacgcgtggtcgaattgcacaccggcaagatcgtgcgcgacgagcagcagggatcctacgattccgcgctgtatttcccggacgccgaagtcgagtcgaaatcgcaccaggcattgggcacttccgacccgaacgcgaaataccgtcgacagaacgccatcgattcaacgaacgctcctgacgacaccgtcgacgtggaaggcgcgacgcgcgccgaaaccgtggtgaacgccgtggatgtggtcgccgctgccgtccatgacggacaggggaacgacggcatcgcccgtcttgccaaatccgtgcattccggacgcaccggccgttacggcgaggccttcgcgtcagtggagaccaccttgacctggggcaagggactgagcctcgaacagatggccgaccaggaacaggccgagcaaaccgaacggaacgaacaggccaagacctccgctgaaaatgatgcctccgagactggtgccgacgaagcatcggcgctgtccgctccgcctgcaccgcccgttccaccgacccaaaccgagcctccgacaccgcccgaaccgcccgtcccgccggcaccgtccgatgaaaaccctgaggacaccaaggagcacgactgatgcgttttcgtttcatcctttccgaaacatggaacagcctcaagcgcaatgtttcaatgatcatctccgtcatgctggtcacattcatctccttcctgttcatcggcgtgtccggcctgatgcaggcacagatcaccgccgcgaagggcgaatggtacgacaaggtcgaagtggtcgtatggctgtgcccggacggcgccagccaggcggcgtcctgctcgtcgggcaaggcgccttccaaccaggagatcgtcgatctggagaacgtgatcaacgaggaagccggcaacatcgtctccaaaatcacatatgtgagccgtgaggacttctacaagaacaccttcctcaagcagtatccgaacggcgaatatcaaggacgcgtgctcaccgccgccgacatgcaggggtcgctgcgtctgaaactgaaggacccgaccaaataccaagtggtatccgaagtgttgagcggccgcaccggtgtcgaggaagtgcaggatcaacgcaagatcttcgacccggtcttctcggtgctgaaccgtgcgacggcggtcaccgtggcgctcgccggcgtgatgatcttggtggccatcatgctgaccggcacgacgattcgcatgagtgccgcctcgcgtaagaacgagaccgagatcatgcgactggtgggagcctcgaactggaccatccgcctgccgttcgtgttggaaggcgtgttcgcgtcgctgattggttcgctgctcgcctgcggaacgttgagcgccatggtgaagctgttcatcacggattggctgtcgaagagcgtgcagtggatgcctctgatcaaccagaagacggtatggctgcttgcaccggcccttgtggtgggagccgtcgtgctgtcgatcgtcgcgtccagcatctcgctgaggaagtatttgaaggcataaaccggcggagtgctgaacgagatgttcagcatatttgaagtttgctggatacaatgtcgaaataggtggatttcgggaagggaatacatgtctaggaaaatgacgagacaggtgcggcccatcgttggactgatgcttgcttcggctatgttctgcgccggcggcgtcgcggtcgtcgccgcgccggctccgcaggcgcatgccgtgagcatgtcggaataccaggcgaaggtgtcgaaccacgccaagctgaagtcgcagcttgccggcgtgagcagcgatctcgccgacacgattctgcagttggccgatttgaacgacaaccagattcctgcggcggtcgaggccgcggaatctgcccagcaggcggcagaacaggcgcagagcctggcggaagcgaccacgcagcggttgcaagcggcccagcaggacaaggcgaaccttgaggagcagatcaagcagaccggctccgactatgatgacgccaaggccgccgtcgcacagctcgcccgcgaaagcttccacggctccagcacgtcggatgtgctggatttcgtcaccgattcgacgaccgccgacgatttcgtcaacaagatgcagtcacaggccgcggtcacgcgaagcgaatccaacgcggcaacagacgcggcgaacgagctgaacacgtcgatgaaccgcaaggaccgtctgggcgccatcgagcagaagatcacccagctcaaggagcaggccgaccagcaggcggcaagcgcccagcaggcggcaagcgaggccaacgccaagcagaccgccctgcagaagctgcgtgacgagggcacggcgaaacgtgagaagctcgaatcgcagaagagccagctgacaacgcagagcgccaaggaagcggcggacatcgtcgccatgaaatcgcagatcgattcatggaacaaccagtacaacaattccaacaacgccgctgtcaaccccaataacaaccagcagcagtcgcgtccgaacaacaacacgaactacaatcccgctcccgcgcctgcacctgcgccggctccgacgcccaataacaacaattccggcggcgccggcggcatgaactatgcggtgcccggcaattgcccggccggttccggatactgctacggacacaacaccggcaacacggtcggcggtgccgcgtatccgtcccgccagtgcacgctgtgggcatacctgaggcgttcccagctgagccttccggtcggctcctacatgggcaacggcgccgattgggccaataccgctcgtggactcggatacctggtgaacaacaccccgcatgtcggcgcggcgatggtgttcgcgcgcggccaaagcgtaggcggacattggaccgccgactggcagtacggccacgtggccgtcgtggaacgcgtgaacgccgacggttcggttctgatctccgaaggcggcactggcttcgcgacgttcccggcttgggagacgatctccaacgccggagcctaccagtacgtccactactgacggttccgttccagacatgaaaccacggcaagcgcgccgtccgcatcgtcgggcgacgcgctttcgtgatatggtcgacggagtcgcgttgcatacactgatcgaaagaaccgggaaggaggtccgacatggccaaggaacagggaaccaaaccgatcgcgcagaacaagaaggcgcgtcacgactacgccatcgaagacaagtatgaggccggtctcgtgttgaccggcaccgaagtgaagtcgcttcgtgaaggacgggcgtcgctggccgaatcgttcatcaccatcgaccgtcgtggggagatgtggcttgagggagccaacattcccgaatatctcaacggcacgtggaacaaccacgcacccaaacgcaagcgcaagctgttgctgcatgcggcgcagatcgacaagctggcccgccaaacccaggccaagggattcgccatcattccgctgagcctgtatttcaaagacggccgtgtcaaggtcgagatcgcgctcgcccgaggcaagaaggaattcgacaagcgccagtcgcttcgcgaggagcaggacaagcgtgaggcgctgcgagccatgcgatacgccaacaagcaggtgcgataaatcggaaaaattccggtttcacatagtgaaagaacgccgattcaggaaaatttttgtaacacaccctctttacgctaggatacggttcggctgaacaggccgatatgaatccataggagagggaacatgcaagcaggaaaagccctgaaaaccgccgccgcgttcatgttgagcgtggccatgctcgccaccggcgcagcatgcggcaccagcgacgacagcgacgcctcggcgtcgaaatccagttcgaagtccagcgaactgaccggttacgatgtttccggcgtgaagaaggacgacgcgatcgccaaaatgctgccggattatgtgaccaaggacggcaagctcaccatcggcatggatacgtcgtacgcgccggccgagttcctggccgcggacggcaagacgccggtcggcttcgacgtggacatcgccaaggcgctggccggagtgttcggtcttgaggccgatccggaaaccgcgaacttcgattcgattattccggccgtcggcgccaagtacgacatcggcatctcgtcgttcaccgtcaccaaggaacgcctcgaggcggtcgacttcgtcagccacttcaacgccggctccgcatgggccgtgaagaagggcaacccgaacaaggtcgacacgtccgatctgtgcggcaagaaggtggccgtgcagaccgccaccatgcaggagaccgccgccaacaagatggccaagcaatgcaaggcagacggcaaggcggagatggacgtcatctccagcaagctgcagaccgatgtgaccaccaacgtcgtcaccggcaaggccgacgtgttctacgccgattcgccggtcgccggctacgcgatcgcgcagaccgacggcgaactcgaaacgcttggcaagaccgaaggcatcgccccggaaggcatcgtcgtcaagaagggcgaccagcagatggacgaggccctgcagaaggccctgcagaagctcatcgacgacggcacctacatgaagatcctcaagtactggggtgttcaggacggtgccatcagcaagccggagatcaacacccccggcaccaacgagtgaatgtttcggaacttttgcgtccgttaatacgctcgtagcaatccgctcttaggttatgccatagccacgtttggctggttgatttggctggattgaagagaggacttgccatgatgaggaacctgaaaggttgggcggcgctcgcgttgagcgcggcgatggtcgtctcgatgggagcctgcggaacctccgacaaaacggattcccaagcttccgacgattcgaattcgtcgtcgaccaccggttacgacgtgtccggcgtgaagaaggacgagaagatcgccaagatgctgccgtcctccgtcaccaaggacggcaagctgaccgtcggcatggatacgtcgtacgcgccggccgagttcctggccgcggacggcaagacgccggtcggcttcgacgtggacatcgtcaaggcgttggcgaaaacgttcggcctcgaggcggatccgcagacgtcgaatttcgattcgatcattccatcaatcggttcgaagtacgatatcggcgtctcgtcgttcaccattaccccggaacgcatgaaggccgtcgacttcgtcagcatattcaaggccggttccacgtgggtggtcaagaagggcaacccaggcaagatcgacacgtccgacctgtgcggattgaagatcgcggtgcagaccggcaccacacaggaggaggaagtcaacaagggcgccgaacagtgcaaggcggacaacaagcttgacatccagatcctgtccaacaagctgcagaccgatgtgaccaccaacgtcgtcaccggcaaggccgacgtgttctacgccgattcgccggtcgcgggttatgcgatctcccagaccgacgaccagcttgaggccctcggtgaggacgtcggcgtgaccaaggaggccgtggccatcaagaagggtgattccgacacggccaaggcggtgcaggcggccatgcagaagctgatggatgacggcacgtacatgaagatcctcaagcattggggcgtcgaatccggcgccgtcgacaaggccgagatcaacccgaccgatttgggctgatcggcgcactgacgctgcgggcgtaggggcatcggacgtatatagatcgatgcccctacgctttttgccgattaacgtcggcgtagcattgcggttttatcgtgtgcctttggaatactggacgtctgattggcaaatggacgattaccgttcagtggatgggaagagaatagaaggagaacccactatgtcgttgaaattcaaatcgtttgccgctctcgcgctgagcgcggccatgatgttctccgttgccgcatgcggcaccacggattccggtgacgccaaaagcgactcgaaggcgaagaacaccaccgttggttacgatgtgagcaccatcaagaaggatgacgagctggccaagctggccgcctctgcgaagaccgtcaaggacggcgagctgtccgtcggcatggaactgtcctatgctccggccgaattctacgccgaagacggcaagaccccggtcggctacgatgtggacatgtccaaggccatcgcccagacgctgggcctgaagccgaagatcgtctcctccatgttcgacaccatcgtcccgtccatcggctccaagtacgatctgggcatcaccgccatgaccatcaccgaagagcgtctgcagtccgtcgacttcgtgagctactaccgcgccggctccacgtgggccgtgcagaagggcaacccgaagaagctcgacacctccgacatgtgcggcgcgaagatcgcagtgcagaccggcaccgtccaggaggacgaggccaacaagatcgccaagggctgcaaggccgacaagaaggccgaagtgatgtcctacaagcgtcaggccgaagccgccaccgcagtggccaccggtaaggccgacgtgttctacgccgattcgccggtcgccggctacgcgatctcccagaccgacggccagcttgaggcgctcggcgacgttgaaggcgtggccaagcagggcatcgccatcaagaagggcgaccagcagctcgacgaggccgtgcagaaggccgtgcagaagctgatggatgacggcacgtacatgaagatcctcaagcattggggcgtcgagtccggcgctctcgacaaggctgagatcaatccgaccgacctcaactgatctcatcagatagatagaaaaaggaaacagcatcatggcgaagaaacaagtcgacggcgacggcctcgatattcccaatcgcattaaagccttgcctgtcaagcgtacgggtccgatcgtggcggccatcatcgtcgcgctcttcgccgcgatgctggtgcaggctttggtcaccaatccgcgtttcgaatggaatgtggtctggaaatacctgttcaacgagaacgtactggaaggcatcaagtacacgctgctgctgaccgtcatctcgatggtcatcgccatcattctggcggtcattctggcggtcatgcgcaaatccatcaacccggtgctgcgcggcgtgagctggttctacatctggttcttccgcggaacccctgtgtacacgcagctggtcttctggggtctgttcgcggtgctggtgccgcgtatcggcgtgggcatcccgttcacctcaatcgaattctggagcattgactcccagtctgtcatcaccgcgttcaacgccgcatggctgggcttggccctgaacgaagccgcctacctggccgaaatcgtgcgcgccggcctcgaggccgtcgatccggggcagacggaagccgcaaaggccctcggcatgaagcgcacgctcatcatgcgtcgcatcgtgctgccgcaggccatgcgcatcatcatcccgccgaccggcaacgagttcatcggcatgctgaagaccacgtcgcttgtcaacgccgtgccgttcacgctggaactgcagttcgccaccacggcgatcgcgacccgtctgtacaagccgattccgctgctgatcgtggcctgcatctggtacctggtcatcacctccatcctgatggtcatccagtcgcgactcgaaaagcacttcggcaagggcttcgacgcccgtccggccggcgcccgcggcaagcgcacgccgttgccaggcaagaccttcggcgagcccaaggatgacatcgacaagcagaacgaagccacgttcgcgggaatgaccgcgtgaggggaacgaccatgagcgaaatcacaaccaacgaaatcgttcccgccgtcaaggcgacccaggtgcacaaggccttcggcaacctgcacgtgctcaaaggcatcgacatgaccgtcatgcccggcaccgtcaccgtgattctcggaccgtccggttccggcaaatccacgttcctgcgtctgatcaaccagctggaaaccctgaccggcggcgaaatcgacgtcgacggcgaaatgatcggctacaagtacgtcgacaagggcggcgaacgtgtgctgcagaccctgaacgacaaggaagtggccgaacagcgttccaaactcggcatggtgttccagcgcttcaacctgttcccgcacatgacggctcttgaaaacgtcatggaggctccggtccacgtcaagcacatggacaagaaggaagcccgcgaactcgccattcaggagctgaaccgcgtcggcatgggggagcgtctcgactactatccggcacagctttccggcggccagcagcagcgcgtggccatcgcccgcgcgcttgccatgaagccggagatcatgctgttcgacgaaccgacatccgcgctcgatccggaactcgtcggcgaagtgctcaacgtcatgctcgacctcgccaaggaaggcatgaccatggtggtcgtcacccatgagatcggcttcgcgcgcgaggtcgccgaccagatcgtcttcatggacggtggcgtggtcgtcgaacagggcggaccggagatcatcgaccatccgaaggagtcgaggtttaaggacttcttgcagcacgtcctgtagcaagtaaggctgtcgtactgccgtaaattcccaatccactgacgtcaagcgtccgcagacgtccggcgggttgggttttctttttgctgccgacgatgggcgcgttgcgtgcgccactggttcgcacgatttccctgggggagtgggatttcgcatatatggcaaagatttgtaaggacgcgcggcttggtttcatgattgacatccttacccgataggctaaggagctatgtgtggaatcgtaggatatgcaggaaatgttcggaccgcgtgcggcaaacccttggaggtctgcctccagggtcttcagcgattggaataccgtggatatgattcggccggcgtggcgttgaccgcgcccggcatggaccatgtggcggtgcgtaagaaggccggccgtctcgccaacctggtgcaggacatcgaacgcgatccgatgccggaagccaccgtgggcatcggccacacccgttgggccaccaacggcgtgccgaacgacaccaacgcgcatccgcacacctcgcgtgacggcaaagtggccatcatccacaacggcatcatcgaaaacgcgtcccagctgcgtctcgacctgcagacggaaggctaccatttcgtttccgaaaccgatacggaggtcgcggcgaagctgctgggcaagatcagcgacaagatcatcgaagagaccggcaagcctgacctgttcaaggccatccgccgtctggcccgcatgctggaaggcgcgttcaccattctcgccacggacgtgcgacagccggacatcgtggttggcgcccgtcacgattcgccgctcgtggtgggcctcggcgacggggagaacttccttggctccgacgttgccgcgttcgtggcctacaccaagcgtgccatggagatcgaccaggaccaggccgtgatggtctccgccgacaaggtggtcgtctccgacttcatgggcaacatcgtggaacatccgaagacctacaccgtggattgggatgcctcggctgccgaaaaaggcggctgggactccttcatggacaaggagatccacgaggatccggcggccgtgcagcgcaccctgctgggacgcctcgacaaggatggcaacatcaaccttgatgagatccgcatagacgagcatgaggtcaaggccattgacaagatcatcgtcatcgcctgcggcaccgccgcatacgcgggcatggtggccaagtacgccatcgagcattgggtgcgcatccccgtggaggtggagctcgcgcacgaattccgctaccgtgatccgatactcacgccccgcacactggtggtggccatctcccagtccggcgagaccatggacacgctgatggcgttgcgtcacgcccgtgagcagggttccaaggtgctggccatctgcaacacgcagggcgcatccattccgcgcgaatctgacgcggtgctctacacccatgctggtccggaagtggcggtcgcgtccacgaaggcgttcgtggcgcagatcaccgccgcctacgtgctcggcctgtacctggcgcaggtcaaaggcgccatgtacagggacgagatcgcccaaaccctggattccctgaaggacatgccgcgcaagatccagtgggtcctcgacacccagaccaagaccgtgcaggaggccgccaagcagatggtggacgcgaagtccttcctgttcctcggacgtcatgtggggtatccggtcgccatggaaggcgcgctgaagctcaaggagatcgcctacaccttcaccgagggcttcgccgcgggagagctcaagcatggtccgatcgcgctggtcgacgagggcgagccggtcgtgttcatcgtgccgcccgcgcgcggacgcaacgtgctgcacgccaaagtcatctccggtatcgaggaggtcaaggcccgcggcgcctacatcatcgccgtggccgaggagaacgatccggacgtggaacgttacgccgacgtggtcttctggcgtcccgcatgcccgacgctgatgagcccgctggtggacgtggtgccgctgcagctgttcgccatggacatggccaagctcaagaactacgacgtcgacaagccgcgcaatctcgccaagtccgtcaccgttgagtaacgaacgcaggcaccggtacgtgctcgaggaacctcatattcccttcgaatatgaggttctgtacgaggacgagaacatcatcgtcatcgacaagccgcatttcctcgccaccacgccacgcggcatgtggtatcgcgaaaccgcgctggtccggttgtgcgagcggtacgacgagccgaacatcacgccggcgcaccgtttggaccgactgaccgcaggcgtcgtcgtgttcgtacgtaatccgtctgcgcgaggcgcgtaccagatgctgttccaaaatcgcaaaaccgtcaaaacctacgaatgcctggcaccgctcgtcccgacgcagcggccgcgatatggaacggcggtgcgcatcgaccggcacctgccgtttccgctggtacgcaggtcgcatatcaacaaggatcgcggacgattgcaggcgtacgaaagcgccgacgtgcccaacgcggaaacgctgatcgaacggggaagcggcatccgcttcgttgccggcagaccgtacgtgaattacacgctgcatccgaaaaccggcaagacgcaccagttgcgcgtgcatatgaattcgctcggactggcgatattgggcgacgatttctacccggacatcgtgcagcgcgcgtacgacgacttctcgcaacccttggaattggtggcgcgcgaactgcgattcgatgacccgctcaacggcgagccacgtcgattcgtatcgcacgtgccgttgggcgcgggcttatagaaacccacgattttggacattcccctatctcgcccgacacgcccgattatcatggcgttctgttgacttgccggagcgtttccggcatcacgagagtaagagagaaccatgggtaaaatctcgaaagccgtccgcggcgtcgccgacatctacaacggcgcatcgctgatcgtccgtatcatcgtcggcctgatcatcggcaccgtgctggcattgaccatgccccacgtgacctggatcggcgaattcggcaccctgttcgtggccgcgttgaaggccgcggcaccgattctggtgttcgtactggtggccagcgcccttgcgcagggcacgtcgaaactcgaccgccgtttcggcaccgtgctgttcctgtacctgttcaccacgttcctggcagcggtcgtggccgtgctgacctcccgtctattcccgcagaccctgtccttgggcaaggccgccaaagccgacgtggtgccgcaaggcctttccgaagtcatccagacgctgctgaccaacatcgtggccaatccgatccaggccatcatcgacggcaactacatctgcatcctgatgtgggcctgcctgttcggactcgccatgaagtccatcgccaacgaaagctccaaagcgttcatggccaacgtggccgacgccgtgtcccaggtgatccgctgggtcatcaacctcgccccgttcggcatcatgggcctcgtgttcaccaacgtggccgacaacggcctgtccgcattcaccaagtacggcagcctgctgctcctgctcgtcggcaccatgctgctcatggtgctcgtgttcggcccgctcgtcatcttcatcttcctgcgccgcaacccgtacccgctggtctaccgctgcttcaaggaatccggcctgaccgcgttcttcacccgctcctccgctgcgaacatccccgtcaacatgcagctgtgcgagaagctcgggcttgacaaggacatgtactccgtgtccattccgctgggcgccaccatcaacatgaacggcgcggccatcaccatcaccatcatggccatggctgccgccaacacgctcggcatccagatctccctgccggcggccatcctgctgtccgtggtctcagcgctcggcgcatgcggcgcgtccggcgtggcaggcggctcgctgctgctcatcccgatggcctgctcgctgttcggcatcagcaacgacatcgccatgcaggtggtgggcgtcggcttcatcatcggcgtcatccaggattccgtggaaacctgcctgaactccgcgtccgatgtggagttcgcggccaccgccgaataccatgcctggatcaagcagggccgtcagctgccggccttcatgtattccaagaaggaacgcgccaagctcggcatcgaagcttgattgcgtaccggcttagccgccgatgcgatatcgcagggaaccgctttggaagttcgcttccggagcggttcttccgcattcggcgtatttgggtggatatggggagtctttccaggcttgtgcgtggcttccgcatgacccgtataatcttatggtggtaatcgcaggcgaaatacaaaacggaggtccgtgggcgtggtgctgaaatcggcgaaactggtgaagcagctcatcgccatctgctgcgcgggcgtcatggcggccagcgccgccgcatgcggggccaatacggacacacgcacacagatcaccgtatggtcgtgggagccgagcatgaaacaggtcatcgccggcttcgaaaaagacaatcccgacatccacgtggtttggaagaacaccagcggttacgacaaactcaacaacgccatccaagacggttacggcattcccgacgtggtgcagctggaatattacgcattgcgccagtacgcggtcagcagccagctcgtgcccatcaccggcagaaccgaaggctatgccgatttctacacgcccggcacctgggcgtcggtgcagctcaacggacgggtgtacgggcttcccatggactccggcccgatggccttcttctataacaacagcgtgttcgaacaggttggcgtggacgcgtccaagatccgcacatgggacgactactacgaggccgccaaaaaactcaagaaaatcggcgtgtacatcaccgccgattccggcgacgccagcttctacgacacgatgatctggctcgccggcggacgcccgttctccacgtccaacgatggcaagaacgtgaccatcagactcaccgaagataaaggcacccgcgaattcaccgaattctggcagaagatgatcgatgagggtttggtggcaacaaacctcacgtcatggtcggatcgatggaaatcggccgtgggacaaggcaaagtcgcctcgctgttctccggcgcatggctgccttcgctgctcatgtccgacattcccggcgcggccggcctgtggcgcgtggcccagatgccgacgcccgacggcaaggccaccacatcggaaaacggcggttcggcccttgccgtgctgcaacgttcccgcaaacccgaagcctcataccgtttcatcgaatacgcctgccacaatgccaaaggcatcacaacccgcgtggatggcggcgcgttcccagccgacaaaaacaccctatccgactcgaaattcctcagcaagaccacggtgaccgacgaccgtggcatcgaagtgccctatttcggcgggcaggaatacaaccgcgtgctgtcccaggccgcggagaacgtgtcgaccggataccagtatctgccgttcgaagtgtatgcgcgcagcgacttccggtccacggtgggcaaggcctacaaatggtcgagcctgctgcgcaaagagcagaacaggctcaacatcatcgccgcaggcggtcaggtctccgacacctccaacatcggcgatgcgttgaagaacaccgaatcgtccgaccgcatcaaacttaagggcggcatagccctatggcagaaggacctgaaagaatacggagccaaccagggcttcaccatccaatagcgtctgtgtaattggtttaatcgattgcggcctgcggatagcgcattatccgcaggccgtcggttttcagattgccgggctatgatcgccggttcccgtcgctggctcttgaatcagcggacgttgcggtcgtagatgtgccgcatgcccttgaaaatcaggtccggatcgtaaatgtcgatcatgttcgtgtcgtcggcgaacacgcggctcaatccgcccgtcgccaccacacggaaatcctcgtcgatctccttatggaactgcgcgatcgtgcgttcgatgccgccgaggaagttgtagtacaggcccgcctgcatggccggtttcgtggacttcgccagaatcgacttcggacgggtgatctccacttccggcagctgcgcggttccctcccacaacgcggccgccgcggtacgtatgccggtggtgatcagtcccgaaatcaccgccgcgtccccggtgacgtaattgaacgtggtggccgtgccgaaatcagccaccagaatcggcccgccatactcgtaatacgcgcccgcgcagtcggcgatgcagtccgcgcccatgttctgcggattgtccatgcggatgttgagtcccgttttgatgcccggtcccacgatcatcggatcgatgtcgaggaacttcacgatgctcgcacggaacgaatgcatgaccttcggcaccacggacgaaatgatcacatcatcgacatccgccggcttgtagccgctcaaagccaggaactgcgtgatcatcagcccgtattcgtcggacgtgtggttcgccttcgtggtgatgcggtacgtgcccgcgatgcgcccatcgtcgatgaaaccgatcacgacgttcgtgttgccgatatccacagccatcagaagcatgttgcgttctccttcgcgttttgcggaagttccgttgaaatattgcgattattgcgatcgatacggttattgcgattcgaaaatgctgcggttagcgccgttcgccgtccgcacgcatggctgcgagcttgacaagaatacgtttcgcaagtgcgtccttgcccatcttgctccatcgttcgatgcttggcctgtctgcggtttcgcccggcgtcagcaccgtcaccacgttcgtgtccgctgcgaaaccggcgccgggggtgcgcaggttgttggccaccagcatgtcgcaatgcttggctgcaagcttcttcgcggcgttggtctcaaggtcgcgcgtctccatggcgaatccgcacaatgtctggtccggccgcttatgctcgccggcccaagccagaatgtccggattcgacgtgagctcgagctcgatgccgctgcgcccgttcttcttgatcttgtcccgggcctgctcgaccgggcggaaatcgccgacggccgcggccatgacggtgatgtccgtgtccgagaaacggctcgtcaccgcgtcgaacatatcccgtgcggtcgtgacatcgaccacatccacgccatacggggcgtccaacgccaccggaccggacacaagcgtcacctgcgcgcccagatcgcgtgcctgttcggccaaggcataccccatcttgccggtggaatggttggtgaggaaccgcaccggatcaagcggctcctgcgtcgggccggcggtgacgagcacggcaagtcccttaagcggcagctcaccgtccggacgattcgcaagcagcagcgctttcaccgccgtttcgatgcgtgccggctcctccatacgccctttgccggcgtcgccgcaggccagcatgccgctttccggctccacaatcgtccaaccgagctcacggcaggtattgagattgcgttgcgtcacggcgttttcatacatatgcacgttcatggcggggcacaggatcttcggtcccttgtcgtacgcgagtatggtgctggtcagctggtcatcggcgatgccgcaggcgattttcgcgatgatatcggcgctcgccggagcgactgccagcagatccgcccacttcgcgtcggccacgtggctgatctgcagcggaccgtccggtccgggcgtcacgtcggccgtagcgccgggacgatgtccggcggcgaacatggacgtgcgtgtcggcgtgtgggtgagggaactgaacgtcaggggagtgacgaactcctgtgcggcggcggtcatcaccacacgcacctcatgcccctgcgtgctccaatcggaggcgagatggcaggccttgaacgcggcgatgctgccggtgacccccaaaagaatatgcgccatggatcaaccgtccttctcgttgtgacctgccgcgactgcgtcaagtatataaccgggccgaagcctccgcgcgctttgcgggcgaatccgaacgggccgcgggtatggcggacggtagaatcaggccgtggtgatcgacctcacgcaggcggtcaaccgcaatcacaacacataatcgaaaatacgaagaggagaaatcccatgtcgtcacctaccggtgcgcacggcgaagccgacgcaaccaaacaggagaacgaacagcagccgcagtccacggcaagcaccgacgccacgctgaacgcgcgtgcgaaatcgtcgaacggcgcgaaatcgcaaggcccgaagaagtggcttatcgcgttgatcgccatcatcgccgccgtcgcggtgattgtcgccattgcagtgacgtgcggcaaaaacgatgacgcgaacacttccggcgtaactaaagccgacaccgtcaccatcgggctcaaactcgccccggtcagcctcgacatccgccaccagtccggatcggccatcgaacaggtgctgatcggcaacgtctacgaagcgctgctgtcgcgcgactccgacaacaaagtgcagccgggcctcgcgaaatcctgggacatctccaaggacggcaagacctacgccttccatctcaaccagaacatgaccttctccaacggcgacaagctcgacgctgacgacgtggcctggtccatcaaccagctcaaggagaagcagtactacaacgccaaccaggtggccagcctcgacaaggccgaagcggtggacgccaacacggtcaagctcaccctttccacccccgactccaacctgctgtggtatctgaccggacgtcctggcctcgtgttcgacaaaaacgccaaatacaacgcgaaaaccgaagcggtcggctccggcccgtataccgtcgaatccttcgactcggccagcaaaatggtgctcaaagccaatgcgaaatattggggaaccgcgcacaagcccgccacccagaacgtggtgatccgcttcctcaccgacgacaacgcagccgtcaacgcgctgaaaagcggtgacgtcgacgtgctttccccggtgaacgccacgctcgccaaatcattggatgccagcacatacacggtgtccgcggccgacggcagcgacaagttcgtcctcgccttcaactgcacgaacgccaaactcaaggacaagcgcgtccgccaggccatccgctacgccatcaaccacaaggagatcatcgcctcccgaggcaacgtcgactacgcgctcggcggtccgatcccgtccgtcgaccccggttacgaggacctgaccggcctgtacccgtacaacgtggacaaggccaaggaacttatgaaggaagccggttataccaccgacaagccgttgcggctcaccctcacctacgccaacacgtacggcaccgaactgggcgaccagctcaagagccagctcgccaaaatcggcatcgatttgaagatcgactatgtggaattctccacatggctgcagaacgtgcacgccaacggcgactacgagctgtcattggtggaccacgccgaaagccacgacttctacaagtggaccacgccggactactattaccactacgacaacaagaacgtgcaggcgctctacgccaaggcgctcgcggccaccgacgaggaggaaagcaacgaatacctcaagcaggcggcgaaggccgtaagcgaggacgcgccggcggactggctgttcggctaccgcgtgacggtggccgtcgacaagcacgtgcagggcttccccagcaagctcagccagacggtgctgccgttgtggcagatctccaagaataagtaagggaacggtatttccatgcgattcgtgggaaagcggctggcgctgttcgtagcggctttggtgggcctgtccgcgctggtgttcgtgatgctgcgcgtattgccgggagacgtcgccgcggtcatcgccggcacgaacgccacccccgaacgcattgcgtcgctgcgcgccgaattcggcttggacaagccgctcgtcgcacaatatggcgattggatggcgggcatgctgcatggcgacctcggcgtgtccgcagtcggcggacggccggtcgcgcggcagatcgccatgcgcgccgccgtaacgttccctctgattgtgctgagcctgctgatcgcgctggcgatcggcctgccgcttggctgcgcggccgtcctgacacgcaatccgcggctgcgcggcctgtttcacggcattgcgatcgtgggcggcgcggtgcccgcattgtggggcggcctactgctgatcctgctgttctcccgtggcacgggactgttgggattgctgtccgcgcaaggcttccccgacaccggctgggccacgtcgggaaaggccctgtcctgtctgctgctgccggcgctcaccaccggcatcacagccggcgcgtctatcatgcgctacacgcgtgccgcagtgggggatatggcctcatcgcaggcggtggacatggccatggcctgcggcatgacccgcaaacaggcggtattgcgcgtggcgttgcgtctggccactgcgcaactggtgtcggtggtcggcctgaccttcgcgcaaatgatcaccggcgtgatggtggtggaaaacctgttcgccctgccgggtcttggcgccatgctggtcaccgacgtcggcaaccgcgacctgatcgcagtgcaaagcgaactgttcctgctggccgcgttcttcctgctgctgggtctcgtggtcgatctgacgcaccgcgcgctcgacccgcggttgaaacattccggcgtcgtttcgggaaaggcggaagcatgaacgcatcgaaacccgcaccatcctcgcaaccggcgtcgtccgcgcaaactacgtcgagacccatgcgatccgtcaccgacgtgacatccactgccaccatgaaaaccgtgctttcgaccatctgggccaaggccggcggcaaatacgcgctgatcgtcatcggagcatggctgctcgtatccgccctgtccctcgtatggacgccgtattcgctgctcgacaccaacggattcaacgcgtgggcctccccgtccgcagcgcacccgttgggcaccgacggcaccggtgccgacgtgctgagctggctgatggccggctcccgcacgaatctcatgatcgccgtgctcaccgtcatcgtcgcggccgcgatcggactgctgttggtcgcggccatggtatcgcgttccggtgcgctcgcgtccacgtcggtggtggtggccgacgcgctgatctccattccgacggtgctcatcgcattgattctttccgtgccgttcggcgcgtccgccgcggtggtcatcgccgcctgcggttgcgcgtacgggctgaacctggcacgcatcctacggccctccgcactgctcgccgcacgttcggcatacgtcgaatcggcattatggtcgggggcaagctccgtgcgcgtgttcttcacgcatatcgtgccgaacacgctgccggtattgtgcgtgcagctgtccatgagcgccggcacctcgctgctggcggaggcgggactcacgtatctgggcgtcggcgtcggagctggcgtgcccagttgggggcattcgctgtccacgtccgtgaaattcatcagcgtctatcccatggccgtcctatggcccggcctggtcgtcaccatggtggtggtcgcgttgaacctgttcggcgacgcgttgcgcgacgcgatcgatccactaaccaatcccgcgttgagggaggccgcatgagcgccgtcatacgtcatctgaacatcgccatcaacggcaagccgatcgtcgatgatgtcgatttggacatcgccgacggcgaacgtgtcggcttggtcggctcgtccggttccggcaaatcgatgatcgcccgcgccatgatgggcctgctgccggctaccgcacaggtgacgggcagcgtcgaattgggtggtacgcaggtcatcggcgcgtcggacgcagcggtcgccgacctgcgcggacggtacgtgggcatggtgttccagaatccggccgccgccctgaaccccgtgatgacggttgctcagcaggtcggcctgccgctgtacctgcattacgacctgtcgcttgacgagcgtcttgagcgggtcgaagcgatgctgagcaaagtggggctttcccaggacgtgctgctgaaatacccgcatgagctttccggcggccagcagcagcgtgtcggcatcgccaccgcgttgatcacctcgccgcgattcatcatcgccgacgagccgaccacggcattggattcgatcacgcaacggcagatcgtcgacctgctgacctcgctggtcgacgacgccggtgcctcgatgctgttcatcacccatgatttcgcggtgctcgcacgcgccactacgcgctgttatgtgctggacggcggttcgatcgccgaaacgggtacgaccgcaagcctattgcaggcgccggcaagcgaacccgcgcgacgtttggtcgatgcggccaggttgcttaccctgccgcatggcaacagtgctggtagcagtgttggcagccgggaatccgcgagagcgcaatccaagcgggagacgttcaaaaacacggcaatcatgaggaaagacgacggcaatgagtgacatcgtgctgcaggggcgtggcatctgtacaagcttcggttcgaagcgggaacgcaggcaggtgctgttcgacgtggacgttgacgtatacgagggggagtgcctggcgattatcggcgcttccggttcgggcaaatcgacgctgacgcgtgtgctgttcggcttgggatccgccgattcgggcgagatcacgtatcgcggccagacaatggggaagcggggctctgccgtgcgccgcatgctacgcggacagaccggcctggtgttccaggaccccttcgcctcgctcgacccgcgctggcgcgtcgcacgttccgtagaggagccgttgcgcttgcaccacaagggcatgggcaatgatgagatcgcctcgcaggccgagcatgcattgcgtgtggtcgggcttgacccggcggtgttcgccgcacggtaccccatggatctttccggcgggcaggcgcagcgtgtggccatcgcgcgtgccatagtggacgatccgggcatcattcttgccgacgagccgatgagcgccatcgacgtggccgcacgcgtgaggattctggaggcattccgcgccatccgcgcggcaaacccgagcatgtcgctggtcatggtctcgcacgatcttggcgtggtgcagcatatcgccgaccgtatcgtcgtcctacatgacggacgcgtcgaggaaagcggtacgaccacggaaatactgaagcatccctgttccgcgtacacgcgctcgctcatcgaagccgcgtccatgcagccctgatcgcaggtcggatcgatgcaaggtaggcggctggaccggctgaaccgactggatcgcctgaatcggctgaatcggctgaaccgactagaacgtgaacagtctgcgcaaccagtcatacagggcgggattcgaaacgttccagctttcgctccgccccggggtcataagccatagcagctgcaagccgatgccgacgataagcagggcgacgatcacgacggtcagccaccggcgcccattttcacgcgcatccgtgttccatacgaacagcaggcacatggtgccgatgagcatcagccatgtcatatcgcacaggtaacgcgcgttcacgccgaacggtccgtcgatgcatgcgatgaggacggcgagaacgaggaacgtgagtcctatcgcaccgcactgtgttgcgtgggagttttggctgcgccgcagtcgaatgaaataccggatggccgcgggcaatgcgagcaggcagatcggcgacagcgcgacgagtccgccggcgaactgttccggaatgatgttccgattacggaacaggaatccccatgggtttgcctcatccagtgagaacacgtccatggtgtaggggaattccctcgtgaaaccgattggggtgaggaacagcaggaggacggaatacaggcgtgctttcagactgacatgccgttgcgtcagatcgcagccggtgagattgtaggctgcgccgaagtcgaacgggtcgtcgaaacgggccgtgttgtatgccatcatcgcgcagccgatgatgaggaacggcagaatcgccgcgatggtggagaggatggcgtgtctggaacgggtggacaggatatcgcgggttcggatttgcggccataggaggatgatgccgaataccgcggtgaggatgaacgccggtctgcaggcgatggtgagcgcgacaagcgtcgaaccgatggcgatgaacggagtgcgtggggtgtgatggccatcgccggaagagcgtgcccacaatgcgatgccggcgggcgcgagtgcgagcgatgcgaggatgggaatcgaatagaaccatgggacgagcaccagatacgtcaatccggatgccgctacgattgcggtgcagacgaggaccgcgagccatctgggggtgctatgccaatagcgcttccacagtgtttcgatgaggaatatgagcgaagcgcatgccagtatcgcaaggaacgcgcatcctgcggcggtcggcagatcggttccggtcagtgctttgaacggcgcgaagagcaggagcgccggcagcgggccgaaatagcagtagtaccggccatggtagaaggcccaatcccagcgtgacggatcgccggtttgcatgccgagggttcctctggcctgttcgtcgtacggattatccatggccgcaagccagtcggggacatgcgcgtcgatccagatcctgccgtgcaggaacgcgtcggcgagttgctggtactgtgaacggtccacgaggaaggtgccgccttggtattgcaaggtgtacacgctgtcggaaggatgcgtggacacggtcagcagtatgagaatcgtcgacatcaccgcccagagaaccacgaaaggcgtccatgtgcgatggcgtttgcggttggtgtgattggtgtgatcggtgcgatcggcttccggcgtgagcggggaacgtccgttgttccccgtcgacggtcgtactcgatgtgcggggaatatgaaagaggttcctctatacataattgcattgtatatcacgtagacgcgatgatatccggtggggtgttgggcgctgcgaaggctgttatatcgcaggttattggggcggaacgagcccgttccaggaagctgatacggttcggatgtccgcatgatgaacgcgggtgacatgccgatgcccgggggagtggtaatgtaagctacatgttcaatcgctcttgttgttgctgtcgctgaccaaccgcccgaggggcgcgtggttcatcgacgcatagcttgagataggacattccaacaagcggccgcgcatatcgcaggccgtatgcgaatcgccaaacaatcattcgaaacagcgcatcagccgaggttggcgcacgcgacgcacgcgaatgagcaaggcagcatcgcaacaggtcccgtttcaacaactgcacgcgacggacgcgagcttctcgaacatacgaaaccaaaaccattcgaaaagcccacgaaccgcaccgtgcaaaggaaacgtcatgaccatccacaattccctgtccgaactcatcggcaacaccccgctcgtcaaactcaaccacgtgaccgacggcatcaaagccaccatcgcggtgaaggtcgaatacctgaacccgggcggctcgtccaaggaccgcatcgccgaacgcatcatcgacgccgccgagcagagcggcgaactgaagcccggcggcgtgatcgtggaaccgacctccggcaacaccggcgtcggactcgcgctcgtggctttgcagcgcggataccgtgcgatcttcaccctgccggacaaggtttccgaagccaagcgtgcggtgctgcgcgcatacggcgccgaagtggtcgtaactcccaccgacgccggcccggacgacccgcgctcctactaccaggtggcggaccgtctcgccaaggcgattcccggcggctaccgtcccaaccagtacgacaatccgaacggtcccgaaagccactaccacaccactggtccggaaatctgggaggccaccgaccacaaggtcacgcatttcgtggcgggcatcggcaccggcggcaccatctccggcaccggacactatctgaaggacgtgtccaacggcgcggtgcaggtcatcggcgccgatccggaaggctccatctactccgacccgaacgatgtgcaccaataccagatcgaaggcgtcggcgaggacttctatccgaaggcctttgatcggagccttcccgacgagatcgtgcaggtcaccgacgcggaagccttcgaaatgacacgacgccttgccaacgaggaaggactgctcgtcggcggctcatccggcatggccgtgttctccgcgctgaaatacgcccgcgagcacgacctcgacgaaaaccagctcgtcgtggtgctgatgcccgattccggccgcagctacatggagaagatcttcaacgacgactggatgcgcgccaacggattcgccgacgtcgtggaacgcaccaccaagcccagcctcgccgaacagtacctgtaaaagaccgtcaaacgactgtccggcagcccgatcgcacctttgaaaccaatgccaatcatccgaacgacccaaaccatccgatacttccaaggagttcccatcatgaccatctcgaccaacaccgaagccctcaacgccaccgctctcgccacccgcgccatccacgcaggtcaggaacccgatccaactaccggagccgtggtcacccccatctacatgacctccaccttcaagcaggatggtgtcggcggtctgcgccacggctacgactacagccgttccatcaacccgacccgcaacagcttcgacgaacagctcgccgctgtggaaggcgcgaaatacgcgttgagcttctcctccggacttgccgccatcgacgtgctgctgcgctccactttgaagcccggcgacaacatcctgctcggcaacgacgtgtacggcggcacctaccgtctgctgtccaaggtgttcgtgccgtggggcatcggcctcgacgtggtggacatcaccgacacggccgccgtctcagccgcgctcgccaagaagcagtacgcgtacatctgggtggaaaccccgtccaacccgctgctcaacatcaccgacatcgccgccaccgcggccgtggcgcacgcgcacggcaccaaagtggtcgtggacaacaccttcgcatccccggtattgcagcatccgctcgcagacggcgccgacgtggtcgtctactccaccaccaagtacatcggcggccactctgacgtggtcggcggcgcggtggtcctgaacgacaaggaaacacgcgacgcggtggccttcctgcagaacgcggccggcgcggttccgtccccgttcgactcctggcttgacatccgaggactcaaaaccctcgacctgcgcgtcaagcagcacagccgcaacgccatgaaagtggcccagtggctcgaaacccgccccgaagtggaacgcgtatggtatccggggctcgaatcccacccgggccacgacatcgcggcacgccagatgcacggcggtttcggcggcatgatctccatccagatcgccgccggtttcgaagcggccaagaagttcgccggagccaccgaagtgttcaccctggccgaatccctgggcggtgtggaatccctgatcgagcatccgggcgccatgacccatgcctccgtggccggcaccacgctcgaagtgcccgccaacctgatccgcctgtccgtcggtcttgaggacgcggacgatctgatcgccgacctggagcaggcgttccgccagatctgaattccctatttccgatagaagcatgaaacggccggcatgggcaagaccagcgccggctgtttcgctctccgcggtcaacgcatggcattgctacacttggaaaccatgacgcaagctgttgattccgccgattccgtagacccccgcgcattggaggcgctgaaccgctatttcggctacgattcgttccgtcctggacaatccggcatcgtctcggccatcctcgccggacacgacgtgcttggcgtcatgcccaccggcgccggcaaatccatctgctatcagattcctgcagcgatcctgccgggcgtcgccatcgtcatctcgccgctgatctcactcatgcgcgaccaggtcgacgccctgaacgacgtgggccttccggccgcgttcatcaacaccactcagacgccggacgaacaggatctcgtcttcgcgcaggcgctctccggccagatcaaactgctgtacgtgacgccggaacgtttggaaaccgaacgattccgcaacttcgccgtccgtgtgccgatctcgctcgtcgccgtcgacgaagcgcactgcgtctcccaatgggggcaggacttccgttcctcatatcttggcatcggcgaattcatcgccggactgcccacacgtccaacggtcgccgcgttcaccgccaccgccaccgaacgcgtgcgccgcgacatcgtttcgattctgggcctgcacacaccgtccatcaccgtcaccggtttcgaccggccgaacctgtatttcgacgtcatcagcatgccacgtaaagacaaagcatcctgggtggcgtcctacatcgccagccatccggacgaatccggcatcgtctactgcgccacgcgcaaggaaacggaagcgctcgccgaatcgcttaacagcgccgtcgccgaattgcgtgccgcagggggtgcggatgtgtcggatatcggcaccatcgccgtcgcctaccatggcggtatgagcgccgacacacgagagaaggcgcaacgcgatttcgtcaccgaccgtgtgcccgtggtcgtggccaccaacgcgttcggcatgggcatcgacaaatccaacgtgcggttcgtcatccaccacaacatgcccgaatccatcgaagcgtactaccaggaggcgggtcgcgccggacgagacggcgaaccaagccgctgcacgctgttgtggaacgaatcggacatcgtcacccgccgccggctgctcgattcggattacgaaaacgaacgattgactcccgaagagcaggaggccgtacgcgcgtcgaaacgccggctgctcgacgcgatggtcggctactgccgtaccacggactgcctgcacgcgtacatgacccggtatttcggcgaaaccgcgggcgcggcggcgaaaacggacggcaaatgcgtgggcggttgcgccaactgcgagcacacattcgaaaccatcgacgtcaccgacatcgcccgagccgtcagccgttgcgtgcacgatgtgaaccagcatgtcggcagcggcaaaatcgtcaaggtgctgcgcggttcgaaggcacaggatctaagctatctcaaccccgaaagcctgccgtcgttcggcatgctcgacgaagtgccggaagcgcgcatccgcgacgtgctgagccagatggccaccgacggcttcctgacgatcgcggaaggacgcctgccgatcgtcggcttcggaccccgtgcggcggaaacggtcgcacccgaattccattacgacatcaagaagatcaaacgtgctgacgcccgtgcgcgtcgaacgcccgacgtgtccactcccgctgtcggatcgtacgtgccggatgacggcgacgaggcgctattccagaagctgcgtgcgctgcgactggacatcgcgcgcgaactcggcaaaccgccgtacatcgtgttctccgacaagacgttgcgtgacatggtacgggtcaagccgatcactgacgaccagttccttgccgtcaacggtgtgggggaaagcaagctcaaacagtacggcgaacggttcatggccgcgattcgggaggattccggcgacgaggcttgaaccggccataaccgacacgcatggcacgacggttgacgttgagcccgcgaaccgtgaatagtggaatgtgaacacaacaacgaaaggacagaacatggcggaagacaagccggtggtggaaagcttccaattggaccacaccaaagtaaaggcgccgtatgtgcgctacatcgatacggaaaccggcccccacggcgacgtgatctcgaactacgacctgcgattggtgcagccgaacgagaacgccattccgaccggcggactgcacaccatcgaacacaccatcgcggtgctgctgcgcgaacgcatccccggttacatcgactgctcgccgtttggatgccgcacaggcttccacctgctgacgtggggcgagcattccaccgaggatgtggctcgcgcattgaaggaatcgttggaattcatcgcctacgaggccacatgggacgacgtgccggcaaccaccatcgaaagctgcggcaactaccgcgaccacagcctgttcaccgccaaggaatggtgcaaggacatcctcgccaagggcatcagctccgacccgttcgaacgccgccttgtgtgagcgttaccatgcctgtgcggtgggcgtggtagtttggacggctggaatgcttgagagaggtatacagtcgaattgaggtgaaagggttgagcgaaaccacttccgaacgtcggttccgtcgtgccaccatggatgatctgcctgtcatgctgaaaatctaccagcatgcgcgtgagcttatggcggccaacgggaatcccacgcaatggggaaacacgttcccacgtgaggaagtgatccttgacgacattcgccagcagcgcaccatgctgctggtggacgaggctgacggcaaggagcgtgtgctcgcccagttcgccctgtgcacgggcgaggatcccacctacgcgcatatcgacggcgcctggctggacgacgactcgtatgtgaccatccaccgcatcgcctcgtcgggaatcgtcaaaggcgcggccaaggactgcatcaactggtgcatcgaacattacggcaacgtgcgcgccgacacgcatccgaacaacaaggccatgcagcacgtgctcgaatcgaacggattcgcccgctgcggcctgatccaactgcttgaccgccccaccgataccacgcgtatcgcctaccagcgtcacgaatggtgattgcgcatacatagaaacatagaaaaaaggacgtctcccgtaaaactgcgggagacgtccttttccatatgaagggatgattagaacagtcccggctcgttaagctgagaatgcttgcggctgtacgtgaaatacacgaccagtccaagcgcgaaccacacggcgaaacgcacccacgtctcccaattcaaaccgaagatcagaatcaggcagaagatgatggcgcagattggcgtgaacggcacgcccggcgcacggaagccacgatgcgcgtccggctgggtcttgcgcatccacaggatgccggccgacacgatgatgaacgcggacagcgtaccgatgttcaccagctcgaacagcacgttgatgttgatgaaaccgccggcgatggccgtcagaatgccgaagaaccacgtgcccttgaacggtgtgcggtacttcggatgcacttcgccgaagaacttcgggaacagtccgtcgcggctcatcgcatagcagatgcgggactggccgtacagctgcaccagcatgacggtggtcatgccgatcaacgcgccgaggttcacgatgaacgccagccagttgaggccggtctcgagaatcacgcccgccaccggagcgtcgatgaacttcgcgaactccttgtacggcaccacgccggtcatgatgagcgtcatgatgatgtacagcacggtggacacggccagcgagatcaggatgccgcgcggcagcgtcttgttcggattgatggtctcctcggcggaggaggacacggcgtcgaagccgatgaagctgaagaacacgatcgacgcggccggcacgatgccgtacggttgcgtcgaacccggctggaacgtgtagatgccatacggggagaacggtttccagttggcgggattgatgtaccagacggtgcacacgatgaacagcacgatgatggccagcttgatcatcaccatgatgtcgttggtcttcttcgtctggttgatgccgatggacagcacccacgtgatgataagcacgatcacgaagccgggcagattgaaatacgtggtgactcccggcgtggtgccgtatgcggcggtcagctcgaccggcagatgcaggccgaagccttccaacagcttgttgaaatagcccgaccagccggcggacacggtggccgcctgcaacgcgtactccagaatcagatcccagccgatcacgaaggcgatcaactcgccgaacgccagatacgcgtacgaataggcggagccggaaaccggtgccatcgcggcgaactccgcatagcacaagcctgcgaagccgcagcagatcgcggcaagcaggaaggacacgcataatgcgggtcccgcggtgagcgcgcccttgccggtgagcacgaagatgccggtgccgatgatggcgccgatgcccagcatggtcaggtcgaaggttttcagtgttcgcttcagcggagtcgattcggagacaagttggtccaccgacttcttgcgaaatagatccatggtcgtcagattccctgtgattgtttcaaaaatgggctggaccggacggatttccgggactctggcacgccttaacgccagaaatcagaaaggccgcggcgatatgcgcaacagccttgtgtatggaaagtgtaaaaaacactgccggacaaaatcgtgaaaacatcgtgaatcgtctcaccatatgtccctgatgttccatacctgtcacatagcggcgcgacaatgggagccatgactttgagcgcaacacgtgaatgggatttctcctccgaacaaggcaaagcgaactacaaggccgcccagcggcggtatccggcgcaggccatcgtcgacctcgccgcactgcgcgacaacatgcgccacctggtgagtgtcgtcggcggaccgcattccggcaccgccgtcatgggcatcgtcaaagccgacgcgtacggacacggcctgatccccgccgcgcttgccgcgctcgcaggcggcgccacgtggctcggcaccgcgcaatcgcatgaagcgctgttgttgcgcaaggcgggcatcggccccgatcgctgccatattctgacatgggtctacagcggcgccgaagtgccgttcgacgagctgatcgacaacgacatcgacatttccgtcggctcgctcgccggcatcgacggtgtcgccgcggccgcacgcaggcttggcaagacggcgcgcgtgcatgtgaaggtcgattccggcttcggccgtaacggcttcacgcccgccggtttcgacgcggcgctcgccaaactggtgccgctcgccaaggaaggcgtgctgcacatcgtcggccagtggagccatctggcggtcgccgacgcaccggacgttccggaattcgttgcctccaccgacatgcaggtcgaaacgttcaaggacttcacccgtcgtatggaggcggccggcattccgccggaaatccgccacctcgccaacaccgcggcgacgctgtcccgtccggaaatccacttcgaactgacccgtccgggcatcggcctgtacggttacgaagccgatccggccatgggcacgccgtccacgtatagcctgaagcccgccatgaccctgcaggcgcagctcggcaccgtcaaggacgtggaagccggccatggcatctcctacggccgtacgtatctgaccccgtccgacacctccaccgcgatcgtgccgctcggctatgcggacggcatccaccgctccgcctccggattcgacatggaaggcgccaagcacgtgaccaagcccggtggtccggtgcgcgtgatgaccgcggaaggcccacgcctgtaccacgtgtccggccgcgtgtgcatggaccagttcatcctcgacctgcacggttccgccgccgaactcggcatccacgaaggcgacaatgtggaactgttcggtccgggccgtggcgaggattacgccgaaccgaccgcggacgattggggtcgtgccgccgacaccatcagctacgagatcttcacctgcctgcgcaaccgcattccgcgcctgtacgagcatgtcacggacgtattgtccgccgaggacctcgccaagctcgacccggcaagcatcctgtaatcccgtaaaaagcggcggcagccgccgcacccataggaaggcggtgcatcatgacgagcgaaggatacagcgcgttcgacgaggagcgttgggctccggaaccacccaaatccagctcccgcaccgccttccaacgcgaccgcgcccgactcatccactcgtccgcattgcgcaggctcggcgcgaaaacgcagattctggtggccggcacggacgatttcgcacgtacacggcttacacacacgttggaggtcgcgcaaatcggtcgacagatcggcacttcgctcggttgcgatcccgacgtggtcgactgcgcctgccttgcgcacgacctcggccacccgccgttcggccataatggggaacgtgcgcttgccgaaatcgccggcaatatcggtggtttcgaaggcaatgcgcaaaccttgcgattattgacgcgcctcgaaccgaaaatactgtttcccgacggacgttccgcaggcgtcaatctgacgcgtgccgcgctcgatgcggccgtcaaatacccgtggacgcttgccgaagccgccgcgcatccgaaaggggagcgcagtgcgaaattctgcgtctatccggatgatacggacgtgttcgcctggctcaaacaacacgcgcccgacaccacccgccgtcccgtcgaatgccaggtgatggacctgtccgatgacatcgcctacagcgtgcatgacgtggaggacgccatcgccaccggcgcgttcaatccgggcgaactgcacgaaaacggagtgatcgacgcggtcgtcgaggacgcgcgcgcctggtatggtccgcaatgggacgccgacaaactggtggacgcgttcgcacgaatgcaccggcgcgacacgtttcccggctatttcgacggttcgcgccgcgcgctcgccgcattgaagaacatgaccagcgatctgatcggtcggttcgccggttccgtggaacatgccacaagagatacgtacggcaacgagcctttgacgcgatacaacggcgatttggtgattcccgaggaaaccagctacgaaatcgtggttttgaaaggcatcgccgtgcatttcgtcatggagcccggcgaacgtgagccgatgcacggcgaagaacagcgaatcgtcaaagacctggtcgacgtgttcatggcggacaatcccaaaccgtcaagcgcattggagaatgtgttcctcgacgattggcgtgaggccggcggcgacgacgaacgcctgcgcgtggccatcgaccaggtggcgagcctgaccgacacgtccgccctgactctccactcccttctctgctgacgcgtatacccccgtttcctgtgtggcgagtcaatgagattcataagtgccgcgtagcgccatgtatgttgtccgaccgtaggcttggccgaacggccttgagtgtgtcggatgacatacatggcgtggagcggctggctgtgtgcctaaggcaaagttgagtgtgtcgcgcgttgcatacgccgcgtagccataacctatggcatcgctggtaggctggaccgtatgccgggaatgatcaagaaggaagacatagaaaaggtccgcgccaccgccgacctgtatgacatcgtatccgcgaccgtcacgctcaaaccctcgggaaccggcacatacgtaggcctgtgccccttccatgacgagaaaacgccaagtttttccgtacgtcccgcgcttggcgtgtggcattgcttcggctgcggtctcggcggtgacgtgttcggctacgtcgaacatcaggagaacatcgatttccgcgacgcggtggagctgctcgccgacaaataccatatcgaactgcattacgacaaggccgacaacgtgcccgcgcacaccggttcgaaacgcgcacgcctactcgaagccaacgaggcggcgcaggaatacttcgtctcccagctgatgaccaaggaggcgctcgccgcgcgcaagctgttggacggtcgcaacttcagccaggccgactgccagcggttcggctgcggatatgccccccaaggatgggataacctggtgcggcaccttgccggcaaaggcttcacccagcaggagatgctcgacgcgggactcgcccgtcagggccagcgtggcgtatacgactatttccgtggccgcgtgacatggccgattcgtgattcgaccggtcgtacgcttggcttcggcgcgcgcaagctgtacgaggatgacacgatcaatgcgaaatacatcaacacgcccgacacgcagctgtaccgcaaaacacaggtgctgtacggcatcgaccttgccaaatcggcgattgtgaagaaacgccaggcggtgatcgtcgaaggctataccgatgtgatggccatgcatctggccggcatcgacacggcggtcgccacgtgcggcaccgcattcggcgccgagcatgcgaagatcatccgccgattgatcgcggacgattcgttgggcgccgtgcagctggttggccccctgaaggtggaggggcaggcgttgagctcgcgtgtcgtgttcacattcgacggcgatgcggctgggcagaaggccgcgatccacgcgttcggtttggacgccgcgttctcgacgcaggcgttcgtcgcggtcgccgaagacaacctcgacccgtgcgatctgcgcatcaaacgcggcaacgaggcggtgcgcgcgctgatcgccaatgcgcggccgctgtacgatttcgtgatcgattcggcaatcgaccgtttcgacaccacgtacgcgacaggtcagatgggcgcggtcaaggcggtcgccccgctgatcgcgcaaatccgagaccgttcgctgctcgacctgtactcacgcaaggcggtacgtcgcatcggcgtcgatctggacatcatgcaacgcgaagtggcgtaccagcgtcgcaaactgaacatgcgtgacgaggacgcgtacgcgccgaaacgtcgattccaaaacaatgcggggccgtcggctgaaccagcatatgcggaacgtggcgcgaatccgtatgcgaatcccgccgcacgcaaggcgttggagcatcgcgacgcggccgagcaaagctactatcgcatcgacgacgccgtgttcatctgcgaacagcagttcatggccacgctgatccaggtgccgttggccgtcgatccgacaatgttcgccagcctgaccttgtcgagtttcatgacgccggtgttccgcacgctgttccaagcggtcgccgcggcgggcgggcttcctggggaagacgtgccgcagggactgtggatgcacaatctgacgaaggcgggcggtccgatgctcgaatcggtcatcaacgagctggccgtcatgccgctgccattgccgccgagcgaagcggacgcgaaccgcaatacaggcgagtcgcaggaacaatcggcgcaattgcgcaagccgacacaggaggagcggcggtacgcgtccgaactgatcgtcagactgcttgataccggcatcatgcgcaagatcggcgcggcccagcgccgcatggcgcaactgccggacggtgcagagaaaatcgaactgctcggacagatcaccaaactggaaacgctgcgcaaggacctgcagtcgcgtgttttcggcaacaacgttgcgtgacacgcccatatggtgaatcgaaggcgaacggaagatgatttttagacaaaatcttggcgcacgcggggttaatttgtgaagatttgcgggccttgttttcggtttcgccggtttgcaaaagcatgcggcagtaagcaatagtggatgaaaatcgttggaatggtcggaaaagcagcacgccgagggttcgtgctagtcgcatttttgggtaaagtggtctaagcgtttgcatgagaatcgcttgggttttgcaaggtgtgcaaggcggttgcaaacgggattgacggaggaatgcatgcggcgattggtcgtcaaggtcctgaagaacgagaccattctcgtagtcgcttccatactcgcactcatatcgtgcttcatcgtgccgccagacaaggaatacgccggctacatccacgccagcaccatctcgcagctgatctgcctgatgcttgtggtgtgcggcttccagcgcatcggcgtgttccgcatcatcggctcgcgcctgctgcatcacgtcaaaaccgcgcgtggcctggtgctcacgttgatcgcattgccgttcttctccggcatgctcatcaccaatgatgtggcgttggtcaccttcgtgccgttcgcaatcgcggtgttgacgatggcgcacatggaagagcatgcggtgcttgtcggcacgctgatgaccatcggcgcgaacgtgggcagcatgctcaccccgatcggcaacgcgcacaacctgtatctgaaagcgttgacgggcatgccgacgtccgagatgatcggcatcatggccccgtattccgctaccgcagccgttctgctgataatcatcacctgcgtgattttcggcagcaaaccggtttccgaattttccgcgatcgatggttccggcatcgaacagaacgtactcgccccgcattccgaccggccgcagcctgacgagattcgcgtgaccggctacggtgccggttatggcggctggcgtacgatcgtatacacggcgttgttcgtcgtctgcttgctggcggtgagcgatttcattccgctgtggttgatgtgcgtcatcgtgttcgtggcgttcctgctatgcgaccgccgcgtgttccgcaacgtcgattggggactgccgctcacgttctgcatgttcttcatcttcatcggcaacatgaaacgcgtgccggaattctacgagctggccgcctcgctggtgggcgcgcatccgctggaagtggccgtggtgtccagccagttcatctccaacgtgccgaccacgctgctgctgtccggcttctgcgaccagtggcgtgaactgatcatcggcaccaacctgggcggcttgggcacgctgatcgcgtccatggcgtcgctgatcggctacaagaacgtgacgcgcgcctacccggacaaaaaaggccgttatctggccgtctacaccgcggtgaacgtgctgttcgtcatcgtgctcgtcggcctgagctggattatcgagtagcgtttggccgtcgaccggtttccctgaccgctaatctcaaggtcgccggttcgcaccttttgctgggattgcatgaaaacccttggaatcattggatttcaagggtttattgttacgtcggctgatggtctggtgctgtgataatctgtgccgggaagcgtgtgccgagaaacgtaggaaggctgaacatgctgcaaggattgctgggaattttctccggactgatcacgccggtgcagaccgcggtgaacacgcggctcggccgttccatcggctcgccgttgcgcgcctcgctggtgtcgttcagcgtcggcctcattgcgatgctgactttgacgctgctgcttggcccgtatccgctgattcccgccaccgcggcgaacggcccatggtggatgtggttcgcgggcgtgttcggtgtcactttcctgaccggcaatgtgctgctgctgccgaaactgggcagtctcaaaaccgtgatcatgccagtcaccgggcagatcgtcatgggcctgctgatcgacgctttcggctggttcggcactaccgcgcagccgatttccccgctgcgcatcgcaggcgcggcgatcacgctggtcggcttcctgcttgccgtcgccggaccgaatctgcgattgaggcctgccatcgatcgcccggctggcggttcggaaaattccggcgattccgaaaaatccgaaactgacggaaaagccgtacatgtgccaggttccgcgaccgtgctgtggagttgcgcaggcatcgcgttcggcatgtgttcggccgtgcagacggcgttgttgggcaagctgggcgtcgcgttgggatcgccggtgaaggcatcgctcgcctcgttcgcggtcggtctgatctcgcttgcgatcgtcgtcgcattcgtcgaccgcacctacagcctcggcgacgcgctgaagaaaggcaatccgtggtggatgtgggtaggcggattactgggtgcgacgctggtgatgtgcaacgcgtacctatccgcgcatatcggcaccggcatgacggtgatgctggtattgctcggtcaggtcggcggaggattgctggtcgaccgtttcggcctgcttggcgtgccccgcaagcccgtggccggcatccaatatgtcggcgtgctcgtagccatcgtcggcattgtgctcaaggcgatgtgattgccgtgtcgagttggcaaccgtgtgcgaactgactatactgtgtttagtttggccctgtagctcagctggatagagcatgtgacttctaatctcaaggtcgccggttcgagcccggccggggtcaccatcaagccctcgcgtcgtttcatgcggtgcgggggctttcctgtccattgaacggcaagccattggcttgcgaagataggggagaccatgaagcgaatcgtcgcgggcattctggcgcatgtggacgcgggcaagaccacgttgtcggaggcgctgctgtacgctaccggccaagtacgcaaactcggccgcgtcgaccacggcgacgccttcctcgacacggacgccatggaacggcagcgcggcatcaccatcttcaccgagccggccgtcatcgccacgcccgacctcaccatcaccctgctcgacactcctggacacgtcgacttctccgccgaaacggaacgtacgctcgccgtgctcgactacgccatcctcgtcatctccggcgcggacggcatccaaggccataccgaaacgctgtggcgactgctcaatcgctatcaggtgcccacattcgtcttcgtcaacaaaatggactcgcccggcgccgacaaaacgcaactgctcgcccaactcaagaaacgcttctcggacggctgcgtcgacttcaccgagccgattgacggcgaacgcatggaggagatcgccatgcaaaacgaaacggccatggacgcgtatctcgacaccgaaaccgtgccggacgaaaccattcgcgccatgatcgcccgccgtgagctgttcccctgctatttcggatcagcgctgaaaatggacggtatagaacagttcgtcgcaggtttcgaacggttcgcgcaagagccgcaatacaatggcgaattcggcgcacgtatatataaggtgtctcatgacgcgcaaggcaaccgtctgacctggctcaaggtgaccggcggcgaactgaaggccaagatgatgctaagcggcaccgcgcacgccggcgacgcggatgcggttgccgaagacggccaatggcatgagaaagccgaccaggtgcgcgtctattccggcgcgaaatccaccaccgtcgacacggtccccgcaggcaccatctgcgccgtcacgggtctgacgcagacattccccggcgaaggcctcggcatggagcgggacgccggcagtccggtcctccagccggtgctcacgtacacgctggaaccgggggagtgcgacattcacaaatgtctcgtcgccctgcgcgaactggaggacgaggatccgctgctgcacgtcgtctggcagtctcgcctagaggaagtgcacctgcagttgatgggcgcggtgcagctggagatcatccagcagatcatgcacgaccgtttcggcctggacgtcacgttcggaccgggcagcatcctgtacaaggagacgatcgccgctccgatcgaaggcatcggccatttcgagccgttgcgacactacgccgaaacgcatgtgctgctcgaaccgctgccgcagggctcgggcatggcatacgccaccgtgtgcagcgaggacgtgctcgaccgcaactggcagcgcctcatcatgcagcatttccaggaacgcgagcatctgggcgtgctcaccggctcgccgatcaccgatatgagaatcacgctgctgacgggccgtgcgcatctgaagcacacggaaggcggcgatttccgccaagccacctaccgtgcgatacgccagggcctgatggaagcgaagaagaagggcgattgccgtctgcttgaaccttggtacggcttccgtctggaagtgccgcaggacatggtcggacatgcaatggccgacatccagcgcatgtcgggcacgttcgacacgtctaccggcgacggcgaatatatggtgttgaacggcacggcgccggtatccgaaatgcgcgactatgcgatggacgtgaacgcgtacacgcacggccgtggccatttaagctgcgtgttcgccggctaccagccgtgccacaatgccgacgaggtgatcgagaacatggcttacgatccggaatccgacctggagaacacgccggattcggtgttctgcgcgcatggcgccggctatccggtcaaatggtacaaggtgcccgaattcatgcatctcgactacgtgtgggatggcatgtgcgaatagaaccgaaagacagacgggtgggaagcgccgattgcttcccacccgaggcctgttgtcggataccgacaaacggataaacgaaaagccccaccgaatcggtgaggcttcatgctggagcggacaacgggactcggacccgcggtctcaaccttggcaaggttgcgctttaccaactaagctatgtccgcaaaggattcctgccgtgagaagcaggcatccagtgggtgatataggaatcgaacctatgaccccttccgtgtgaaggaagtgcgctagccgctgcgccaatcacccgtgggatgtctccaccggtttcccggcttcgtcatccgcttcgcgtgggcgatacaagattcgaacttgtgaccccttccgtgtcagggaagtgcgctacctctgcgccaaccgcccgaagcgagtgctaacttacgtggaatttcagcgaaatgcaaatcgtcggcgtgtcgcggtgttcgcgcggagttagcttgctgttcgtcagacggcgggttccacctgagggaactccagcgtttccgcgtcgcggtccgcctcgctggaaggtgtcaacgcaagtcgcatctgatgccaaatcacattgccgtgcgtcgaatcggacagaccctcgtccacgaatcccaatcgtgaataaaaaccgacaagacgctccttgcaggtgagcacaatgcccttgcgtccggcctgtgccgcgtcgagaatcacctggcgcagcagatagctggcgcagccgcgatgctggtagacgggtgccacatccacgccgaaaatcatctgccaatcgccatgctcgtcatgcatatcggcgtcgtcatacatggcatcggcaagattcggctcgtttgtggccatgccgtcgacgaaaccaaccaacgtgccgtcctctacacgcgaggggaacggggtatcgtcgtcatcggtgttgaccaacagccagaaatggtccggataagcggccacgcgtgcggtaaggctttcgttgcttgcggcctccgcaggtgggaagcaggcggcttccacagcctcgatcgcgtccagatcctccatcgttgcatgtcgaatgagcatgtgcatactctctcgcaaggcatacccaatcttcacatttcgatatgcgccgacggcgcaatccgccaacatgccatactgtagaagaaccttggagggatcgcaggacgactgtttcgcgatacctgataagtccttatacgaaaaaccgataacgaaactggctcgtagtggcgaataaagcgatagtatgagccgcgttcgccggaacaaatacgaaaaatccgttgagaagagaaggaggcgcgcgtgttcgactggacgttcatctcgcactacgcgccgttcttcgtcagcggtgccgaaatgacgctgttcatttccgtcttcggcatcatcctggcgatcgtggtcggcttggtctgcgccggcatcgagatcgcgcgcatccccgtcctgcggcaggtcgtgcgcgtctacatcgagctgagccgtaacacgccgttgctggtgcagctgtacttcctgtattttggcctgccgaaactcggactcgtctggtccgcggaactgtgcgccatcgtcggactcggcttcctcggcggctcctatatggccgaagcgatgcgcggcggcttggagaccattccggaagtgcagcgcgaatccgcatacgtgctgggcttgagcaaatggcagacattaagccgcgtggtcattccacaggccatcagcacctccattccaggcgtcgtggccaatgtgatcttcctcatcaaggaatcgtccgtggtgtccgccatcgcgctcgccgacgtgatgtacatggccaaggacctgatcggcatgtactacgacacctatgagtcgctgttcctgctgattgtggcgtatctggtgattctgctgccgatctcgctgttcggcacttggctggaacggaggttcgactatgagcggcgctgagattctgctcgagccgggcgtgattccgcgcctgctacagggcctgtgggtcacggtgtggatcgccggcgtgtccgtggcgttgtccgtgcccgtcggcctgatcgtcggctggctgatgacgatgaaaaatcccgttgtgcgggtgctgaccaggatttatctggatttcatccgcatcatgccacagctggcgctgctgttcatcgccttctacggtttcgcgcaggcatggaattggaatttggatgcgaccggcgcatgcgtgttcgtcttcgttttgtggggcggcgctgaactgggcgatctggtgcgtggtgcgctcgaatcgattccgaaggcgcagtacgagtcgtcgtacgttttgggattgagcggctggcagacgttcacgaaagtgattctgccgcaggcgttgcgccggctgctgccggcttccgtgaaccttgccacgcgcatcgtgaagaccacgtcattggccgtgctgctcggcgtggtggaagtcatcaaggtgggccagcagatcatcgacgcgaaccgtttccagtatccgacgggcactttgtggatttacggaacgattttcttcatgtacttcatcgtgtgctggccgctgtccatcgtggcccgcaggttggaaaagaggtggaagcatgactgagcaggctgaacaggttacgcagaccgcgcaaaacagcgggaaatcgcagacaagccttgaaatcaggcatctggtcaagcggtatgccaatgcggacaagccggtgctggacgacatctccttcgacgtgccccacggcaaggtgttcgttatcgtcggaccgtcaggatccggcaaatcgacattgctgcgcaccatcgcgggtctcgagccgattcagggcggtaccatcgcgttgaacggcgaagtcatcgaaaccggtaaacccggtactgaatcggccggccgcagcaaacgaggaagcgaactgcgcacgcgcgtcggcatggtgttccaaagttatgacctgttccccaacaaaaccgtgctcggcaacatcacgctcgctccgacgctcgtgcaaaagcgggataaggcggaagtcgaacaagaggccatcgcgctgttggagcgcgtcggactcgacggtcgtaaggatgcttggccgcatgagctgtccggaggccaacgccagcgcgtggccatctgccgtgcgctgatcctgcatccggaagtgctgctgttcgacgaggtcaccgccgcgcttgatccggaaatggtgcgcgaggtgcttgacgtgatgctggaactcgccgactccggtcagaccatgctcatcgtgacgcacgagatgcaattcgcacgagccatcgccgaccaggtgatcatgctggaggacggcggcatcgttgaacaatccgacgacgccgaagcgttcttcaccaatccgaaaaccgagcgtgccaagcgtttcttgcacacgttcgaattcgacaggcatcgcaggccggcggaaacgccgacggaaccgacgggaacttccgccgagtaatcgcaagttttgatagcagtcatccgtacaagagaggagtaaccatgaccgcatcaatcatcaacaagacaatcaagagcatcgtggccgcatcggccgcgttgatcatggccgcctccgtggctgcctgcggtcccaacgccgccaccccgagcgaggagaacaacgcctccaacggcggcgccaccacgtccaaggtgaccgcccgctccctggacgagatcaagaagtccggcgtgctcaaagtggccgtcttctccgacaaggccccgttcggctacatcgacaaggacggcaagaacgccggctacgacatcgtcttcgccgagcgtctcgccaaggatctgggcgtgaaggtcaagtacacgtccgtcgatccggccgcccgtgtggatgtgctcacgtccaacaaggtggacatcacgctggccaacttcaccgtcaccgacgagcgcaaggagaaggtcgacttcgccaagccgtacatgaaggtcgcgctcggcgtggtctccccggagaacgccgaaatcaccgacgtgagccagctcaagggcaagaccctgatcatcgccaagggaaccaccgccgaaagctacttcgagaagaacgagcccgacgtcaagctgcagaagtacgaccagtacgccgacgcctacaacgcgctgctcgacggccgtggcgacgccttctccaccgacaacactgaggtgctggcctgggccaagaccaacaagggcttcaaggtgggcatcaccaagctcggtgacgaagacaccatcgcgccggccgtgcagaagggcaacaaggagctgctcaactggatcaacgacgagatcgtgaagctcggcaaggagaacttcttccacaaggattacgaggagaccctgaagccggtgtacggttccgacgtcaacccggatgacattgtggtcgaaggcggccagctttgattcttacctgacctgacggcggactgccgtccgtcaatcctgtttccaagcctttcgtggcacacgccgcggaaggctttttcatgccgattccgggccggttatgtcacatccttcgaaaccgtttacagtccacgcgggtgtatgtttccggaggtttcgtaccatccgataacccctcataaataaacgctatggcgattcgcacgttgtataagcaacgtcgataatctccggcgcgtggcgctttccaagacacggttaagtaggaaccagcgatcgcgtgaacggcacgcggcaaggaaaccacaccgagggggtgcgcaccatgaccagattcaacactcagctcgtccacggactgccggtcaacgacaacaacaccggagccgtgaacccgccgatctacaactcgtccacctatgctttcgaatcggtcgggaccatgccccgctgggattatgcccgcagtggcaatccgacgcgcgagttcctggagaagcagatcgcgcagctggagcatggcacgcgcggtttcgcgttcggttccggcctggccgccatccacgcggtgctgtcgatcttccagccaggcgaccgcatcgtcgtcggcaagaacatctacggcggcacctactcgctgttccacgagtatttcgaacgctggggcgtcatcgtagaggaagtggacaccaccgattacaaggcgctcgatgcggcggtgtccggcgaatccgccaagggcaatgcgcatggatgtccggccaaggccgtgtacttcgaagtgctcaccaacccgcttctgcaagtcaacaacgtgacggccattgccggaatcgcccatcgtcatggcgcgatcgccatcgtcgacaacacattcgtcaccccgtatctgcagcagccgctcgaccaaggcgccgacatcgtcatccattccgccaccaagtatctggccggccattccgaagtcaacgccggcctcgtggtggtcaaggacgatgagctgggcaagcgcgtctacttcgcgcaaaaccgtttgggcggcgtgctcgcgccgaacgaatgcgattcggtgcgtcgcggcatccagacgctcgccttgcgcatggaccgtcagcaggagaacgcgcgtgcgatttccagctatctgctgctgcacccgttggtcaagtccgtgcattatccgggactgcccggccacgaatacgagctggcctccaacggtctcaagggcggtggtgccgtactgagcttcgaagtggtgccgggcgtcgaccctgcggacgtgctcgacaacctgcatatcttccgtctggcggtttcgctcggcgcggtggaatcgcttgccgaactgccgtgccgcatgacgcatttcgaactgccgcgcgaggagcgtctgaaggtcggcatcaccgacgaactggtgcgtctcgcagtcggcatcgaagacaagcaggacctcattgaggatttcggccaagccttcgacatcgcgtacgagaactatctcaagcgtcacgccggcgagagtctgttcaccttcgcgcaacacgtatatgcctgaaagttttgctatcggtagggatttgaatattaactggcacgctatctcacgaaccggacaggggaaagcgcccctctgtccggctcgtggacgtatgtgggtcagctcctggacaggcgatggttggttcgtggacggcccttgcccagctcgcggacattgtctgcatacgattgcattctttggtaaatttttactcgggttcggcaatggttgcagaacctacgaaaggtcatgcgacaagacctttaaagagaaaccaaagaagggagtaatgccatgccgttccttgtagcgctccttgtcattgcgctgatcatcgcgttcctgttcctgtccacgttgttcatcgtgccgcagcagcaggcatacatcatcgaacgtttcggcaagttcaacaaggtccagttcgcgggcatccacatccgtatcccgttcgtggaccgtatcgccatgaaaaccaacatgcgcgtcaaccagctcaacgtgcagctggaaaccaaaaccctcgacaacgtgttcgtcacggtcgtcgcctccacccagttccgtgtgaacccggaaaacgtggccaccgcctactacgagctgcgcgacccggccgggcagctgcgctcctacatggaggatgccctgcgttccgccattccggcgttgagcctcgatgacgccttcgcccgcaaggacgacgtggccttcgacgtgcagaagaccgtcggcaacgaaatgtcccgtttcggtttcaccgttgtcaaaacgctgatcaccgccatcgacccgagcccgcaggtcaagaacgccatggactccatcaacgccgcccagcgtgagaaggaagccacccgcaaccgcgccgaagcccagcgcatccagatcgagacccaggccgctgccgaggcggagaagacccgtcttcaaggcgagggccaggccaactaccgtcgcgagatcgccaacggtatcgtcgaccagatcaagagcttgcaggctgtcggcatgaacatcggcgatgtgaacaatgtggtgctgtttaaccagtacctcgacgtgctgcgctccttgagcgaatccaacaacgccaagaccgtcgtgctgcccgcatccacccctggcggctaccaggacatgtacagccagatcacgcaggcgatggtgacagccaacgaaaccgccggccagcactcgactgtgccgacaccgccgcacgtcgctccgacgacgccgcgtatctgacacatgtttggtgatgcctgcagtcgtcgggcatacgttgattggccgcaggcatgtgaatcgcaagaaagcgaaaacgaaaaaaagaatcccttctttcgtcggggagccgcgtagatgtgacggagagtgcggaaacgatgaaagaagggattcgtgttgcaagtgcgccgtcgtaccacgacacacgtctgttatacggaaggcttcgctcggacgtcaggccagagtgacaagcttcccgggagaaggtgcgttgagacattcagtagcatgcgcttccatggaacggagctggtcttgcagatccatgactttcttttccaaccatgcgatggtcatggattgggagatgacgagcaggtcgcgctggtcagctgcggcttcgttggcaaacgattgtgcttcggtcatgatttgcggatctgctttccaccgtgcgatggcgcgttcgatacgtttactgccaacgattttcgggttaagacctgcgctggcgaagatgctggtcggcccgttgccccgtaagtattgcgccatgcaacgcacttggaattcccttgaataggtgatacggtccattgatgccctttctaccgcgggcaaggtgttgagatagtagacttccgcctgggtgaaatgacgtttcatattgttcccctttggtgtgaaaccgtttgacattccacaatctgaagattattgctgatggtttcattttatttttgacattttggtcgaaaggtcatttggcacgaaacaagggtttttggcacgaaacaacatgttccatatcgttcaggcggggtttcttgaacggttttcgagtttcaggcacgcgcggaccgtggcttcagggtgttcccttaagggtggcgaagcgcggtgaaacactttagacttaggagcaattatcaacatattcccagaaaacgaggaggtgaatgtgccggtaggtagcacatccaacgctgggaaaaccggtcgcggtcccattatcgaggttaaaaacctacgcaaggaatatccagtgctcgatgagaccgtcgtagcactggaacgtgtcaatctcgccattccgcaagggcagatctgctgtatctatggcgagtccggatccggtaaatccaccctgctcaatcagcttgccggcatggaaaaaccaactaaaggtggtgtacgtatcacaggtgtgcccatcagcaggcttgacgaacggcagctggccgaattcaggcagaagcaccttggcttcgtgttccagtcgtacaatctgctgcccaatctcaatgccatcgagaatgtggccatgccactgatgttccgaggcgtgccgaagcgtaaacgcgagacgatcgcgcgtgccatgctcaagcgggtcggccttggcaaacgcatgaaccattatccgacccagatgtctggcggtcagcagcagcgcgttggcatcgcccgcgctttcgtgacacgtccgcaagtggtattcgccgacgagccgaccggcaatctcgattccaaaaccaaaaccgaagtgatagatatgatttgctcgttcgcacgcgatttcaaccagaccatcgtgctcgtcacacatgacgacaatatggcgcaatacgccgatcgcatcgtcacacttcttgacggccgcatcatcggcgaccggcttacgtaacattcatgacaacgcatatcgacaactatgacgacaacagaagggccttccatgggcaacaacacaagaatcgcaacactgctcaacggggcaatctcactattggcggtggtcgccatcacgttggtgtgcattgtgccgacggcgttcgccgaagatggtgccaatacttccgatgctccgggtgcgggagcggacaacagtgttgagcagattgctgggccggtgccgaacatcattatcaccaatttcacctatggcgacgggtcggtggcggtcggcagcaccttcaacctcggtttcaccttccaaaacatgggcaaagtggcggtgagcaacatggtggtcaccgtggacggcggtgagaattttgccatctccggcggtacgaacacgttctactacgatgcactgaatgcgggagctgcgttgacgcagaccgtgccgatgcagacactggccagtgcgaaaaacggcgcgcagggcatcgacatcagcttcaaatacgagtatgtggacggtaccgcacgcagctccaacacttccgacatcaaaatttccgtacccgtttcgcagcctgatcgttttgaattgaacgatccagtggtgcccaatatcgtcaacgcgggtgaggaaactactatcaccatggattacgtgaacaagggcaagggcgacgtttccaatgtcgaggcgagcgttgaaggcgacggtatcaccgccacgcaggccaagcagtacgtcggcaatgtggcgtccggcgcgtccggctccattggattcgcattcactgcggacaagcccggcgaaaccgaagcgaaactgacggtgacgtatgagaattccgatggacagccgcagaccaaggaatttccggtgaaaatcaatgccgttgaagctcctgttccggatgattccgatacggatgttgacgtccaggatcagagcatgccggtctgggtgtggatagtggcggcggccgttgcactcgtcgtgattgtactgacggtcgtattggtggtccgtcaccgccgtaagaaggcaaagcaggcggccgatgatgacgattgggattgggagcctgccgatcttggagccgataagcagggtaaatctactgccatggctgccgatgcgccgacgcaggtaatcgccacggcaggtggcacatcggccgcctccgtatccgcaacgtcatcttccactccatccgtcaaggagtaggcatgcgattttcggatatcgcacatacttgcgcgcagaatttgctgcggcgcaaatcgcgtacgattttgacggtgctcggcgtgatcgtcggctgctgctccatcgtcctgatgatttcgattggacaaggcatcagcgagcagaatgagcagatgctcaagagcatgggcaatctcaacgacattaccgtcacagctgccggcggctcgggcgcgtacgacagctctggcgtcggtatgtcgagtttgtcttcgtcggacatgacatcatcggatcatcaggccaagcttgacgatgctgcggtacagacgttccgtggcatttcaggcgtcgcggccgtgatgccacagcggtcggcgcagagcaccgtggatctcactgcgggagccggatcccgatacgtggctcaatatgcttctgtgatgggtacggatatgacccagcttgaagcatcgggatacaagctcgttcaagggcgtatgccgaagcgtgccggagaagtattgctcggcaaatacgcggcataccagtttatggataagtatcgttccgatgatgactccaggcgtatcgctcccggtgattatgagtgcgatgagaacggttgcaaggagagcgagggggagaagccgttcttcgacgtactgaccacgaaactcaatttgattaccggagccgattatcaaagccctgacgattaccgcaaaataggcagcacttcgatgagttccaccgattcaggcgacggcgatggtactgccagttcgcagaatcctgtggtttccatgcctctcaccgtggtcggtgtgttggacgcttcaaccaataattacgatgcattcagctccggtgtagtcatgtcgctggaggatatggacacattgcaggccaaaatcgacggcaaaaccaataccaccagccggaccaaaacaaactacgaccaagtggtggtgcacgctcaaaatatcaaggatgtgccgggtatcgaagcgcagatcaaaatgtctggctaccaaaccacgtccttcgaacagacccgcaaggagattgaaaagcagagtcgtggcatccagctcgcattgggaggcattggcgcggtgtcattcctggtggcggccatcggcatcgccaacaccatgattatgtccgtgtcggaacgcactcgggaaatcggcattatgaaggcgctcggctgctatgtgaaggatattcgcacgatgttcctatgtgaagcaggtgccatcggtctggtcggtggacttatcgcctgtctgatttccgccttggggtcgctgagcatcaatctgctgtcgtttggtggattcagtatggaaaacgtaggcaaagcgattatgggcggtgacgacgtgagccgaatctccgtgattccatggtggctgtttgtcgtggccgtgctgttttcgattctggtgggcatactcgccggtttggggccagctaataaggctgtgaagattcctgcgttggacgccatcaagaacgagcaatagcgattgcgattgacaataatgcttatggtcggccatgtgctgttcagcgtgggccggcatttcgcgattgttcaacgttccctgtcgatttttgacggtgccggctagttgcgtgattaacgggccaagacgcggcgaatgcgatcagccaccgcttccacagtcagcccgtaacgttcgtcaagctcggcaaggggcacacgatcggtgaattctttcgatgcaccgaaattgagcgcatgcacagtggctgctttcggattagtggaattcgcgtagaacgcggtcaccttctcaccccagccgccttccagctggccatcctccaaggtgacgaccacacgatggccgtcggcaagcacgtccagcagctcgccatccatcgcggaatactgctgcgcgtcgataagcgtcgcattgatatcgtcgtcgttttcgagcgttgccgccacctcggccgccaacggcagtgtattgcccaagccgagaatcgccacttcacgtcccggacgtacgatctggtaccgcgtgaaagggcaatcgccggtaatatcgatcgtcgtctcgtgcgcgtcggcacgttcggccgggtcgaacgccatatcggcggaacgctccatggcaagaatctgctcgccgggcatgcggatagccgtcacaccatgatcagacggccccgtggtccatgcaagcatgtccagcatctgctctccgctggtcggtgccagacaggtcacatcaggcgtgttggcgaacatcgtcatatcgaacgtgccggaatgtgtattgtccgcgccggaaatgcccgctccgaaaatcagcagcgtcgccggaacatgattcaacgccagctcctgctgcaactggtcgtaaatacgctggaagaacgtggcggaagtcgccagaactggccggcctccagccttcgcgatgcctgcggcgaacgcggccgcatgctcctcggtaatgccggtgtccacataatgcgatccggcacgttcacggaaatcacgggtgatgccattcgaaccaggtgtggcgggggagatgaccaccagtcccggctcgttttcgaaacgggactccaacgaagccatggccatctgaccgtagtatttgcgcgcgtcaagcggcttgccgagcgcgctgtccggatcctgccaatgattcgcctcgcattggccggcatgcggctgcggattggtctggttgcatccgtcggaaccatcctgcgcctcggtctcatcgctgaaacccaagcccttggtggtgtggatatgcagcacgacgggatggtcgatatccttcaagtcttcaagcgccgcgaccagcgtgtccacatcgttgccctgctccacataacggtagtcaagtccgaacgccttgaacagattcagctccgcggttccgttcgacgcgcgcagacgggcaagattgccgtacatgccaccgaaatcctcggcgatcgacatctcattgtcgttgacgacgatgatgagattaccgccctgttcggcagcgttgttcagtccttcgaaagcgatcgccgagctcaacgaaccgtcgccgatgatggcgatgacgttgccgatttcgcttgctcccgcagcggtatgttgcatatcacgtgttttggcaagaccgcaggcaagggagatggacgtgccggtatggcccagcacgaaggaatcatgctcgctttccaacggattggtgaaacccgtcacctcgccgaaccgcgactcgtccagatacgcctcggcgcgcccggtaagcatcttgtgcacgtagctttggtgggagacatcgaaaacgaaacggtcacgtggagaaccgaacacgcggtgcaacgccacggtaagctccaccacgccaagattcgaaccgatgtggccaccatgcttccggccgtaattcaacagcgtggaacgaatctccagacacagatcacgcaactgttgcgaagaaagggcatgcacatccgccggagaatgaatcgaacccagtatgccagcggtcattatgcgcaactgtccttccctgaacctgtcttctttaccgcggaaaatcctatcccactgtatgcctctgccggggtgtcggttgtgaaatacctgcaaagtcttctcaactgcggcacaatggaaacgatgaaatgaatcgaaccaccgaaaaaccgcgaaggagcgctgaccatgaaagccgtatacgcagcaggaaccgattatgacaatccgctgtcgcaactcaaggtgggggagctggacacgcccgaaaccaagccgttctggagtaccatccacgtggccgcagccagcgtgaaccaccacgacatctggagcctgcagggcgtgggactctccgccgaacagacgccgatgattctcggcaccgacgcgtcaggcgtgctcgacgaggacattcctgttcgcaaagggctgaaagccggagccgaagtggtgctctacaccttcgtcggcaccgacggcgccggcgtcatgccgggggagcggcgcaccatcctatccgaaaaatacgcgggcaccatggccgaaaccacccaagtgcccagcgccaacgtgttcgccaaacccgccaacctgaccctcgatgaggctgccgcgctcggcaccagctggctgaccgcctactcactgctgttcacatcggccaacgtgaaaccgggagacaccgtgctcgtccaaggcgcgggcggcggcgtgtccacagcggccatccaactcgcccatgcggcaggactggaagtgttcgtcacgtcacgcagcgaagagaaacgagaccgcgcgatcgccatcggagccgacgccgccttcgaaaccggcgcgcgactgccgcataaggtcgacgctgtcatcgaatcggtcggcgcggccacctggagccattccgtcaaatccgtacgccccggcggcaccatcgccatctgcggagccaccacaggagaccagcctggagtcgaactgacccgcatcttcttccaggacattcgcgtgcaaggcaacaccatgggttcgcgtgacgatttcgcacgactgctcaaattcgtggaacacgccgacctgcaccccgtcatcgactccacctacgcgcttgccgacgcgcccgcggcgttccgcaaagtggtcgacggcgacgttttcggaaaggtcgtgctgcacatcgagccgagtaagtaaagtagacggtgttctggaacacataagtctacgtaaatccttcggaggttttgatggcagacaacaagcctgaagtcgcggtgatcatgggatcggcaagcgattgggagaccatgaagcacgcatgcgagatgctcgaccagttcgaggtgccgtacatgaagcaggtgatttccgcgcaccgcaccccggaactgatgggtgagttcgcgcacaacgcccgtgccaacgggctgaaggtcatcatcgccggcgcgggcggcgcggcccacctgccgggcatggtcgcggcgcagaccatactgccggtcatcggcgtgccggtgcgctcccacgcgctgtccggctgggattcgctgctgtccatcgtgcagatgccgggcggcattccggtggccaccaccgccgtcggcaactccggcgcaaccaacgccggcctgctcgcggtgagcattctgagcaccaccgacgagcgactggccaaggcgctgcaggactatcgtgactccctgaaggaaaaggtggctgaatccaatgcccagcttgtctgaggaaaccaacggccgtatcgaacgactgatgcccggcgcgaccatcggcatcatcggtggcggccagctcggccgcatgatggcgctgtccgcgcgctacatgggcttccgcatcggcgtgctcgacccgacacccgactgtccgaccgctcaggtcgcggatttccaagtgaccgccgaatacgacgacatcgccgccatccgcgaactggctgaaaagtccgacgtgctcacctacgagtttgagaacgtggacgccgacgccatcgaccaagttcgttccctcgcggcggccccgcaaggcaccgatctgctgcgcgtcacgcaggaccgtgtcaacgagaagcggttcatcaacgaccatggcacgcccaccgcgccgtggaaggctgtcaacagcgtcgaggaacttgaagcggcacttgatgagatccactatccggctgtgctcaaaacccgttccggcggttacgacggccacggccagaccgtgctcaagtccgaagccgacttggagcaggtgcgcgcccgcgccgaccatgacggcagcttcccgccaagcattctggaaggcttcgtcgatttcgcgttcgaagcgagcatcctcgtcgccggcaacggcaaggattacgtgaccttcccgatcgtgcgcaacgagcatcgcaacaacatcctgcacatgaccatcgcgccggccgaagtggacgaaaccgtggccaaggaggcgcacgagctggcgttgcgactggccaaaggcttcgaactcgccggcattctggccatcgaactgttcatcaccaaagacaacaaggtcatcgtcaacgaactggccccacgtccgcacaattccggccactacaccatcgaggcctgctcgttcgaccagttcgacgcgcacattcgcggcatcgccggctggccgctcgaacagccgcagctgctcaagcccgccgtcatggtcaacgtgctcggccagcatgtggcgccgacccgtgcgctcatcgccgaccatcccgaatggaacgtgcacgactactgcaaggcggaagtgcgccacgaccgcaagatgggacacatcaccgtgctgaccgacgacaccgccaaaaccgtagccgaccttgaagccaccggctgctgggacgacttgaggaaagcctgacatcataagtaatgagtgaacatatcgtgcggcagacccgccagaaagacgccatccgcgacgcgctgaacggctgcgacgaattcatctccgcgcaagagctgcaccgcaagctggaagaccgtggcgaacatatcggactcgccacggtctaccggcagctcaacgccctggccgaggcgggccgcgccgacacggtccgcctcgacggccagcagctgttccgcctgtgcggcgacgacggacaccatcatcacctcgtctgtacgaactgcggcaaaaccgtggaaattgaatcgccttccgaaagctggctgaaaggcatctccgacaagtacggcttcaccatcgaacggcacacgctggaggtgttcggcctgtgcgaggactgccggaaggcggacaagtagcggctgtctgccgtatttccgttggaatcgtatcgccatcggcgcaatccaatcgtaaaaatcgtaaagaaaaaacgttggacgttgtctttttcagacgcgtatatgacaatagggcattgcaaacgaactaagtggggttatgcgtgaccaaagcaacatcgaaaaacgagccgattgaggagctcgacatcgctaccgtggacccgatggccaagaaagcgggcaaggagttccccggctggctctacggcgtgctattcgtgctgttcgatgcggtgggcgttgccgccctgcagatcggcgtcagcgaatccgccactcgagtccaactatcgaacaacatgtggctcaccggttggggattcgtcggcaagatgttcaccagcgccaattttgtggctgcgctcaacctcatactgtggggcgtcctgtacgtgatcctgctcatgctcaccaaccgtttctgggtggccacgccgatatttctggcggtgacgttcatcgtcgcggtgatcgagcatttcaaagtgtcgattcgatacgaggcgattctgccaagcgacctgaacttcctcaaagccgatgcgggcaatctgatgggcttcatgccggccggcgcgcaatggaccattctgattgcggtcgtggcattcgcggctttcgtggcgctgttcgtcttcctgaaccgtcgtgacgcgcggcatggtaagctcttccgcggctcggacaagcaatcgcgttcagtgaacgcgatcacgcgcctgctgctgattctgcttcccggcctgttcttcacgttgtattcgatgcaggtgagtaccgtcggctcctgggccaaggccttcgccaccgtcatgggagacaagccttccatgtgggattccgtatacgatgcccagcgcaacggtccgctggtggcgttcacccggcagctcaatccgaaagtcatgattaaaccggaaaactattccgaggaaaccatgaaggaggtcgcggcccgttacacgaaggaagcgaagaaaatcaacgcggaccgttccgcgaatatgaccgacagcacggtgatctacgtgctgtccgaatccttctccgacccgtcacgcgtgccgggactcaaagtcaacaaggattccatgccgaagatccgtgagatcaagcagaacaccacgtccggtctgatgctgtcctccggatacggcggcggcaccgccaacttggaatacatgggactgtccggcctgagcatggcgaatttcgattcctccctgaccagcccataccagcagctggtgccgagcgagcattggacgccgacaatcaaccagatgtggggcgcttctaagaattccatcggtctgcacccgtacgaatcgtctatgtattcgcgcgccaccaactacaagaagttcggcttctcgcatttctacacgctgaccggtccggacgtcatctctcatcaggacaagctcgacgactcgccgtacgtctccgacgaggccacctacaagagcacgctggaacaggtgaagaaaaccaagtccaaccagttcctgcaggtcatcaccatgcagaaccacatgccttaccacaagtggtacaagcataacgatttcaaggcgacctccaccacggacaaaccgttgaaggacgacgagcaggagtccatcgaaacctatcagaagggcgcttcgctgacagatgatgcgaccgccgatttccttgccgaactcgacaagctcggcaagccggtcaccgtggtcttctacggagaccatctgccgggcatctactcgtcggcttccgctgatgacggcaactcgctggcgttgcatcagacggactacttcatctggtccaacaaggcttccggcacgcaaggcaacaagatcggcaacgccgactattcgtcgcccaacttctttgtggcgcaggccgccgagcatatggatgccaaggtgtcgccgtatctggcgttcctcaccgaaatgcactccaagatctcggccatggaaccgccggtggtcaacaacatccaaggttgggaccgcattccggagggccagaacatctatctgaacgccaagggcgagcccatggccgaagaggatttcgacgccgagaccaagcagctgctggccgattacaagctcattcaatacgacatcaccacggggaagaattacctgaaagacacctccttcatggacctgccgtaacgaggacggcgcgcctgccgcacggctcgacactcgacgtaccgttgtgcgccttcgtgtcgtgccgcacggaattcgcgcacgtcctcgtcacggcaggcgtgtggtgggcgacgacgcgcctgccgcacaaatcttaaaacattgaggggctgttccaaactattggaacagcccctcaacggctattggttcagcgcagccaacacaccatcatcacgcgttcagcgctttgaaaccgatgtcgtgacggtagaacatgcccttggtgtcgagcttgtcgatgatcgcgtagaccttgtcctgcgcggccttgatgtccgcagcggaggtctcgaccagcagcacgcgaccggagttggccacgagaccatgctcgccacgtgcgacgcccgcatagtagacatgggaatcgtcatctactgtgatctcaggaatcgcggcacccttgaccacgttggtcgggtaaccatcggaagcgatcaccacgccaagagtggcattgtcctcatcccacgtgaattccggggtttcgccgttgagaatggcgttgatgccggcaccgagatcggacgtgagcttcggcagcaccacttcggtctctggatcgccgaaacgcgcgttgaactcaatgaccttcgggccgtcggcggtggcgatgagaccggcgtacagaatgccggtgaacggcgtgccctcgtcggccatggcctgaacggtcggcttgacgatggtttcgatggcggtgtcgatcacatcctgaccgatctgcggaaccgggctgtaggcgcccatgccgccggtgttcggacccttgtcgccatcgtaggcacgcttatgatcctgcgaaatcggcatcggccagaaatcggtgccgttcacaaagctcatcagagagaattcctgaccctcaaggaaatcctcgataaccaccttcgcgccggcgttgccgaagcggtggtccacgaaaatgtcctccaaagcggcgatggcggtctcctcatccatcgccacggtcacgcccttgcctgcggccaggccatcggccttgatgacgatcggcgcgccatgctcgcgcacataagcggtggaacgctccaaatcgtcgaacgtctggtacttcgcggtcggaatgtcgtgacgttccataagctgcttggcgaagtccttggaaccctcgatctgcgcggcggccctgttcgggccgaacgccttgatgccggcggctgcgaaatcgtcgacgatgccttcgataagcggcacttccggtccgacgaacacccagtcgtaaccattgttcttcacgaaatcgatgagcgccgcatgattggacgggttgagctgcgtggtgcggatgccgtcaagctccatgcccggattgcctggggccacagtgacctcgctgacgctgccgccacgcatgagcgcgtgggcgatggcatgttcacgcgcaccggaaccaatgaccagaaccttcatatttcctcctgttgtatcccttatggggaagagtgccaatctcaagaaataatatcgggggtgcctgttcggctacccccgtatgttcgtttactgcagttcgacgtcctcgccggtcttcttgacgatattgcccagcacatagccggcctcgccattggacttcagcagttccatggtcttatcggcatcttcggcgctgacggccagcaccatgccgatacccatgttgaagatgttgaacatttccatatgatcgatgctgccggccttctcgagcacgtcgaaaatcgggagcaccggccaggagccaaggttgatatgggcggcaagaccgtccggaatcatacgcggaatgttctcgatgaaaccgccgccggtgatatgcgcgacgcccttgaccacgcccgccttgaacagcggggaaagggccttcacgtaaatcttggtcggagtgagcagcacgtcgccaagcttctcaccgcccagttcgtccagtacggtgtccacggtgtagccgacctgctcgaacagggccttgcgcaccagggagaaaccgttggaatgcacgccggtggacggcaggccgataagcacgtcgccctcagcgatggtggagccgtcgacgatagcggacttttcggccacgccgaccgcgaagccagccagatcgtactcgtcctcgtcatacatgcccggcatctcggcggtctcgccgccgatcagaccggaaccggcctgcacgcagccgtcggccacgccggagacgacctgctcgagcagagccggatcgttcttgccgcaggcgatgtaatccaggaagaacagcggctcggcgccctgggcggcgatatcgttgacgcacatggccacgcagtcgatgccgatggtgtcgtgcttgttggccatcttggccacgaccagcttggtgccgacgccgtcggtgccggaaatcagcaccggctccttgtaaccgagggaagcgagatcgaacaatccgccgaagccgccgatgccgccgaccacgcccggacggttggtgcgcgccacgtgggacttgatacgcttgacgacttcgtaaccggcctcaacgcttacgccggcttcctcatatgcttttggcatatctaacctttctcgggtctcagtgttcttcttgggatgaagtggtggtgtattcgttgccttcgtacttgctcttgtacagggcgaattcgggcagacggacacgatcctccggagtgagcgacttcaggaagtcggcttcgtagtcgtccaaggcggtcggatagtcgccgttgaagtaggctacgcacaggccgccatacggtgcgtccgcgccaaggccgatggattccaccaagccgtcgagcgacaggaacgccagtgaatcggctccgatgtagtcgcggatctcgtcgacggacttcttggccgcgatcagctccttggtggtggagatgtcgatgccgtagaagcacgggtacttcagcggcggggagctgatgcgcatatgcacttcggccgccccggcctccttgagcatctgcacgatgcgcttcgaggtggtgccgcgcacgatggaatcatcgatgacgaccacgcgcttgcccttgaccacgccgcgcactgcggacagcttcatacgcacgccctgctcgcgcagctcctgcgtgggctggatgaaggtgcgtgccacgtactggttcttgatcagacccatttcgttcggcaggccggcctcctccgaatagccggaagccgccgacagggaggagttcggcacggcgatgaccatatcggcgtcgacgggggattcctgagccaggcgcgcgcccatgcgcttgcgggccgaatgcacgttcacgccgtagatgttggaatcgggacgtgcgaagtagatgaattccatcgagcagatggccagctgggtctgatccgtgtaacggtcgatgcggtagccatcgtcatccacgaccacgatctcgcccgggcggatgtcacgcaccagttcggctccgacagtgtcgagcgcgcaggtctcggaagcgagcacataggcgccgttcgtcatcctgccaagggacagcggacggaatccgttcggatcgagcgcgccgatcatggcatgttcggtcatgatcagataggcgaagccgccgtgcacggtgttgagcgcttccttgagcttgtccatgaacgtgggcttgctggaacgacggatgaggtgcatcagcacttcggtgtcggagttcgaatggaagatcgctccctcgtcctccagcttgcgacgtaaggaggggcaattggtgagattgccgttgtgacacaacgccatatccccgtcatggaagcggaagatgaacggctggatgttgtcggtgccgccggaaccggctgtggcgtaacgcacatggccgatcgctttgtctcctttcaggcgttcgatttcccgttcgtcgctgaacacttgggtcagcagacccgttccgcgatgaccgatgagatgaccattatcgttggagacaatgccggcaccctcctgaccgcgatgctgcagcgcgtgtagaccgaagtaggtgagtcgggcggcgtccgagtggccccaaacgccgaaaataccgcattcctcgtggatgtcttcgagttcagctgacaagccaaagctccttccaaaaccatggagacaaggggttcgctatcgtccaacagtatcaatgggcggctacaagagtcgggttttgtccagttctcagacggtatatggaaccggacatgcaatcgaacagccgttcgaaaaagctgttatgatggaagacgttgaaaacgcgaatcacggtcgtcggggtgcgggaagtcccccgtatgagccattgcatggaaggagcatcatggccggacgaatatacgtggcaatcgacctcaaatccttctatgcgtcctcggaatgcgtggaacatggattccctccgctatccacacacttggtggtggcggaccaggagaggaccgacaaaaccatctgccttgcgatctcgccgtcgttgaaggcatacggtctgcccggacgcgcccgcctattcgaagtcaaagcgaaactgaaggaaatcaacgcggtccgtcgcgccgcggctccaggcggtgtgctgacggggaaatcgtatgatgcgaaggcgctcgcggccaatccgaatctggctgctgacgtgttcatcgccaaaccgcgcatgtctcattacttggcgatgagtgcgaaaatctacggtatttatctgaaatacgtttcggctgaggatatccacgtctattcggtggacgaggtgttcatggacgtcaccggctatctgcgcgcctatggaaaaggggtggaggagatgacccgtgacatcatccgcgatatccacacccagaccggcatcaccgccaccgcgggcatcggcacgaacatgtatctggccaaagtggctatggatatcgtggccaaacacatccaggcgggggaggacggcattcgcatcgcccggcttgacgagatgtcgtaccggagattgttgtggaatcaccggccgcttaccgatttctggcgtgtggggcgtggatatgcaaggaagctcgaagcgcacggactggcgaccatgggggatatcgctcgctgttccattggccgtgccgacgaatactacaacgaagatctactgtacaagatgttcggtgtgaacgccgaactgctcatcgaccatgcgtggggctgggaaccgtgcaccatcgcggacatcaaagtgtacaagccggcggggcacagcttgagttccggacaagtgctgacagggccggcgggattcgacgcagcccggctgattgtgcgtgaaatggcggatacgctgtcattggatttggtagcgaagggcgtgaaagccggcagagtgggattgatggtcggctacgacacggcaagcctcgatccgaaacggcttggcaaggacggttccgctgatttgaaggcgattgccgaacatgccgtggcaacatacgacggccctgtttcgatcgacaggtatggccgccgcgtacccaagccggccaccggggcgatcgcattgccggagccgacgtcggctacgtcgcgtatttgcgacgcggtcgataagcttttcctttcgatcgtagacaggcgtttgctggtccgtcggctgaatgtggtcgccgccgatgtgctgaccgacgagcaacttgaggaacggcggcaggcggccgcgtccgaatatacgcagcctgatttgttcgccgcgatggaagcgccggtggattccgcttccgctgatgcggccgaatgcgaggctatgcgttccgccgatggtggttccaaggattcgccacgaggggacgccgaactgcatatgcagcaaacgcttctggacatcaaacgcaaattcggcagaaattccatcatcaaggccatggatatgttcgatgacgccacaggccagcagcgcaacaagcagataggaggtcatgcggcatgagccttacggaaacccatcgctacgacgacatcatcgatctgccgcatcaccaatcgcagacgcatgcccatatgagcatgcataaccgtgccgcccaattcatgcctttcgccgccctgaccggttacgacgacatcatcagacaaaccgcgcaatccagcgatgatgcggtggaacgcgccaacaggcccgtcgatctcgccgagggttacctttccgcctgaagcggctgctatgacgaatgtcgtggattgctgtatatgaaagggtggattcggaatcatgagatttcgaatccacccttgattatgtgagcgtgaaaagagtcttgatgctcaggcggtgaagtattccacgccggctgcgaacagcggctggtccttttcgccgggcacgttcacgaacgtgccgttgctgtagcgctcggagtggcccatcttgccgaacacgcggccgtccgggctggtgatgccttcgatggcgagcagcgaaccgttcgggttcacgtccagatccatgcccggcacaccgttctcgtccacgtactgcgtggcgatctggccgttggccttgagctgggcgagcacgtcgtcggacgccacgaaacggccttcgccatgggagatggcgatggtgtgcatgtcgcccacctcggtcttcgcaagccacggggagaggttcgatgccacgcgggtgcgcaccagacggctctggtggcggccgatggtgttgaacgtcagcgtcgggcattcggcggtcatcggcacgatgtcgccgtacggcaccaggccaagcttgataagcgcctggaaaccgttgcagatgccgagcatcaagccatcacggttgttcagcaggtcgcgcacggcctcggtcacggccggagcgcggaagaacgcggtgatgaacttggcggagccgtccggttcgtcgccgccggagaagccgccaggaatcatgatgatctggctcttcttgatctcctcgaccaaagcggcggtggactcggccacggcagccggagtgaggttgttcacgataagcgtgctcacgtcggcgcccgcgcgttcgaaggcggccgcggaatcgtattcacaattgttgcctgggaacacagggatgatcacgtgcggcttggccacaccggtgccggtgtacacggtcttcttcgttgtgtcgaaggacacggtttcaacggtcttgcccttctcgtcgcccttggaacggtacgggaacacggattcgatgccgccctcccacgcgtcctgcagctcggccaagtcaagcgtctcgccggcggccgcgaacgaatactcctcggtggtttcgccgacctcgctgacttccaccaggttggacacggccggaaccttcgcattgtcggcaagctcgatgatgaaggagccataggccggagcaaacaggtcgttcacggcaatgccgtcggccagcttcacaccaatctggttgccgaccgtcatcttgaagatcgcctcggcggtggcgccgtagcccggagtggacacggccagagcgtcgccgaaatcggtgagttcctcaaccgcggagaacacctccagcagcgaatccttgtccggggtgagaccatcggaatgatagcgcggggcgatgcggaccacacggtggccggcacccttgaactccggggatgtggcgcgcttcatattgcccaccgccacagcgaaggagatcagggtcggcggaacgtcaagctgctcgaacgtgccggacatggagtccttgccgccgatcgcgccggcgcccagatccacctgagccatcaaagcgcccagcacggcggccatcggcttgccccaccgttccggctcgtcacgcagcttctcgaaatactcctggaagcttaggtacgccttctcatgttcgaagccggcggcaaccagcttcgaaagcgattcgaccacggacaggtacgcgcccgtgaactggttctgctccataatgtacgggttgaatccccaggccatcgcggaagcggtggtggtctcaccgaacaccggaagcttggcgaccatggccatgttcggggtcagctgcttgcgtccgccgaacggcatgagcacggtgcccgcgccgatggtggagtcgaaacgctcggaaagacctttgttggaagccacgttcaggtcggtgagcatggtgtgcatgcgctcggaaagcgtgccggaagcccacggcgtcgtgtagccgtgctgcgcctcgacatgcaccacctgatgcttcggagcgccgttggaggcgaggaattcgcgggaaaggtccacgatcgtgtcgccgttccacaccatcgtcatgcgcggatcctcggtcacggtcgcgatgacctcggcctcgaggttctcttccttggcgtagccgaggaactcgtccacatcttcggcggccacgtccacggccatgcgttcctgcgattcggaaatcgccagttcggtgccgtcaagaccctcgtacttcttggacaccttgttgaggtccacatacaggccgtcggcaagctcgccgaccgccacggacacgccgcccgcgccgaaatcgttgcaacgcttgatcagacggcacgcgtcaccacggcggaacagacgctgcagcttgcgctcgaccggcgcgttgcccttctgcacttcggcgccgtcaagctccagcgattcgacgttatgcgccttggaagcgccggtggcaccaccgatgccgtcgcgaccggtacggccgccgagcaggatgaccttgtctcccggagccggggtctcgcggcgcacatgatcggctggagtcgcggccacgaccgcgccgacctccatgcgcttggccacatagcccggatggtagatctcgtccacctggccggtggccaggccgatctggttgccgtaggaggagtagccggccgcggcggtggtgacgagcttacgctgggggagcttgccctcaagcgtttcggaaaccggcacggtcggatcggcggcaccggtcacacgcatcgcctgatacacgtaggaacggccggaaagcggatcgcggatgcagccgccgatgcaggtggccgcgccaccgaacggttcgatctcggtcgggtggttgtgcgtctcgttcttgaacaggaacagccaatcctcgtcatggccgttcacatccaccttcaccttgacggtgcaggcgttgatttcctcggattcgtcgagattcttcagaatgccgttcttcttgagccatttcgcgccgattgtgcccatatccatcaggcataccggcttggtgtcgcggcccagctcgtgacgcatctcaagatacttgtcgaacgcggccttgacggtggcatcgtcgatcgaaacctcgtcaagctgcgtgccgaacgtggtgtgacggcaatggtcggaccaatacgtgtcgatcaccttgatctcggtgatcgtcgggtcgcgctgctcctcggtgaaatgctcacggcagaactgcaggtcggccagatccatggcgagaccacggtcctcgatgaactgctcaagctcggcgtcgctcatagaacggaagccgtcgatgacctccaccttgcctggcaccggcacccgggccttcagcgtggtcttgacatccagagaggcttcacgggcttccaccggattgatcacgtaatgcttgatggcctcgacgtcggcttcggaaagctcgccttccaacgcatacaccttggcggaacggaccgtcggacgctcgccttgggagatcagctggatgcactcgctggcggaatccgcacgctggtcgaactggccgggcagatactccaccgcgaacacggtgtcggaaccgaaatcaggcaggtcggcgtagacgttgtccacctgtggctcgctgaacacggtcggcgtggcctgggtgaacagctcctcgctgatgccttccacgtcgtaacggttgacgagacggacgttcttcaaagctccgatgccgagaatggtgcgcaactcgttggcgagctgctgggccgcgacgtcaaagcccggcttcttttccacgtacacgcgaaaaaccatggtcaactccttgaaaaaagaggggttattggatttggattgacaaaagaatgaaggattgcgatataacaaggaagcccgcatccggctttcgcttcagatgcgggcttgcaaacgcattactctgcgacttcgatgccctcggacttggcgagctcggccagacggctttcgatctcctcgtatgccgggatgatgtcgcccaggtcgcggcggaacaggtccttatcgaggtgctccaccttgccggaatggtcgcgctgatcccacagacggcaggaatccggcgtgatctcgtcggcgagcagcagcgtgccgtcggaggtgcggcccatctcgatcttgaaatcgaccagcttgacgtcgatcttggcgaagatttcgatcagggcttcgttgatgcggcgggcgagcggcgcgatttcggccagatcctcgcgggtgcacacatcgagcgccaccagatcgtcgtcgttcacgaacggatcgtgcagatcgtcgttcttcaggaagtattcgagcaccggctccttgagctcgatgccctcttcgacgcccaggcgggagcagaagtggccggccgcggtgttgcgcagcacgatctcgagcgggaacatcgtgaccttcttgaccagctgggaggtctcgcccacgcgtgccaccaggtggctgtcgatgccgcgcttcttgagcagatcgaagatcaacgtggtgatgaggttgttcagcctgcccttgccggcgaagtcttccttcttttcgccgtcacctgcggtagcggagttcttgtattcgacccagaggacctccggatcgtcagttgcgtacagttgcttggctttgccctcgtagagcttttccaacttctccattactcgcctttcctggtgtgtgggaggtagatagtttggtgaacttgacggttaacaagataccaacgggaggctacaatcgcgcgacttttgggcgcgttccggcagcctcgtctcagcatccggcgatagccgtcaaacgattgcgatgtcgagcgattcggccacgttcccggctttggcgcgcgcatccgcctcgttgccgccgatggccagcgcgactgccatgcgtcggtgcccatgcacttctggcttcgcgaagatacgcaggtcggtacccggttcggcgagcgcggcggcgacgttgcggaattccgcttcgccatcgccctggacgacgatcgcatggcttgctgcgacggtgccttccggaatcgacagggcgacatgttcctgtgtgatcggcaggccgaggatcgcgcgcgcgtgcaatgcgaattcgctcaatcgctgggaagccatggtgaccatgccggtatcgtgcggacgaggggagacctcgttgaacagcacgtttccgtcggtcagcacgaacagttcgacgccgaacacgccccagcctttttcgccggatgccttggccttcgccaccagaccttccacggcggttcgtgcgatgtgctgggcctgttcgagcacgtccggcgtgaaggtggccggctgccaggattcgcggtagtcgccgctttcctgacgttgtccgattggagcgcaggtcacgatgccggcgctggagctgacggtcagtacggtcagctcgtagtcgagcggggcgagggcctccacgatcacgcgtgacacgtcgccttcgtcgtgtgcgcggcggccttcctgcgcttcggtccatgcggcgtcgatcgcttccgcggaacgtaccacggactgtccgtggccggaggagctcatgatcggcttgaccacgcatggatagccgacgatttgcgcgccctcacgtagttcttccagagagccggcgaaacggtacggggtggtcggcagtcccagttcctcgtgtgcgagcacgcgcaggcgttcgcgatccatgcagatcgccgcgatttcggcgcttggcaccacctgcgcgccacgtgctgcggcggccgcgagttcggaggtggcgatcgcctcgacttccggcacgatgatgtccggctggatttcgtcgaacagcgcgcgcagctggtccgcgttggccatgtcgagcacgcggtattcgtgcgccacctgttgtgccggcgcgccggcgtaggaatcggccgcgcacacccatgcgccgagtctcatcagttcgatggtgacttccttgcccagctcgccggagccaaggaacagaacacgggtcggatgcttgccaagcggagtgccgagggcacgattctcttcagtcatgacttctattgtgccatcggcgtaggatggaacgcatgtccgagaatgaaaagaatgaaacgcagcgccccctgaccattgccatggtggtcgacacgtcggggaatcggggcaatggcacctcgaattcggcgttgcagtgggcgcaggagctggagcgccaggggcatcatgtccgtttggtgggcatcggcgcgcccgaatatcccgcgcgcgtcaatcatgtgccgttggtcagctgggtggcgaagaagcagcagatgcagttcgccgagccgagcgacacgctgtttcgcaaggcgttcgatggtgtggacgtggtgcatatctacacgccgttccgttttggccagcatgcctgcaaggtcgccaaacagatgggcatcgccgttacggccggctaccacgtgcagccggagaacgtcacgtattccgcggggcctttgaaatatgtgcccggcatcgactcgttcatctactggctgttcgacatatggctgtaccgcaagatcgaccatgtgcatgtgccgaccgaattgggtgcgagcctgctgcgctcgcatggatacaagtcgaagctgcatgtcatctccaacggctacgaatcgcggttcacgccgaagcggcagcgcaaggcggacgagccgtcgccggtgccgttccgtatcgtcgcgtcgggacgactgaccaatgagaagaaccatgtcgcgttgatccgggcgatcgcccgctgccgtcacgcgcaggacatcgaattggtgatcgccggcaccgggccgcttaagaagaggttgcagcgtatggccggacggctgttgtctcgtccggcttcgatcggattccaccggaatgccgacatgccggcgttgctgcgttccggcgatctgctggtgcatccgtcgatcgccgatctcgaatcggtgagtgtcatcgaaggcatggccgccggtctggtgccggtgatcgcctcgtcgtcgctgagcgcggccggccagttcgcgctgctggacgaatcgttgttccccgtggacgatgtggacgcgctggcccgtcgtatcgactggtggatcgaccatccggcgcagctcgccaagtggggcggcacctacgccgaacatacgaaaaccaattattcggtggaatcgtccgtacgtaagttcgtcgcgatggaacgtgaggcgatcgccgataaccgtcgctgaatggcgcctgccgcaatcgcaatacaatcgttatacataagcgaaaagccgggagcgatttcccggctttccttgttttgcggactgtcttttacagcagtgcgaccagctcgtccacctgctcgtcggtcgtggcccagctggtgcagatgcgcatcacggtatgcgtgtcgtccgccttttccgtgaagccgagacggacgtcgcgttgcagacgttcggaggtctcgttgtcgagcgtgacgaagatctggttggtcggcgcatcgaaagtcagcgtgtagccacgttccaccagcaccttgcggatacggtccgcggcatcgttggcgtggcgggcgatgcgcaggtacaggccgtcggtgaacaacgtgtcgaactgcagtcccagcagccatcccttggccagcagcgcgccatgctgcttgacgatcgtcacgaaatgctttggcatgttgccgtgcgtgaacaccacggcctcgccgaacatcgcgcccaccttggtgccgccgatatagaacacgtcggcgagacgcgcgatgtcctcgatcgtcacgtcgttgccggtggcggtcagcgcgtagccgagacgcgcgccgtcgatgaacaacggcatgtcgtacttcgtgcagaccttgcggatcgcctcgagctcggccagcgtgtacagcgtgccgtattcggtggcctgcgaaatgtacacgcagccggggaacaccatatgcgtgtagttgccgtccgcgtagaacgtggcgcagtattcgtcgagttcatccgcgttgattttgccgtcatggtgggggagcgtgagcaccttgtgtccggtgaattcgatagcgcccgcctcatgcacgttcacatgtccggtggtggccgccaccacgcccgcatacggcggggtgatggcgtcgatgacgacctggttggtctgagtgccgccgacgaggaagaagatttcggcgtccgggcatgcgcaggcctcgcggattttggctttggcgctttcgcagacgtcgtcggtgccgtagccgggatactggttgggcgcggtttcggcgagacgggcgatgatttccggcgtcgcggcgcaggagtagtcgttttcgaaagacagcatggtcgttccttttgttgtgggttgcttgcgatcgggaaagtctggttccgcgcgttcggcctccgcggatagcaaaaaacctcggaatttcttccgaggtttcaccggggtggctaacgcggctcgaacgcgcgaccttctgaaccacaatcagatgctctaccaactgagctatagccaccatgttctcacttccatgcggaagcgcaacgaatggatactatacacgattttttggatgtgcgcgcgtcggcgtgttgcgctttcggctgccatgtgatgttcattatgtgaacggaatgttacgcacttgatggatgggtgcctaatttgtaggcaattccaacggaagatgtcacgacggggtcggcagaaagccggtcccgttttgttttcctcggaaatgacttccatggaaacgtgattgagaaaagaggaaacgataatgcagaagatcaaggcgtttggtgattggctcaccaaatggttcaccgtgatcgtgatcgtatgggccgtgttcaactacttcgtgccgcaaaccagcctgtggggcaagtcctacaccggatacttcctgggcatcgtgctgtttggcatgggcctgacgctgacgctcgacgatttcaagcgtatcctcacccagccgctgatggtcgtcgtcggcacggtggcccacttcgtgatcatgccgttggtggccgtgctgctgtgccggatcttccgtctcgacggcccgcttgccgtgggcgtgattctggtcggctgctgcccgtccggcacctcatccaacgtgatgagctatctgagccgtggcgacgtggcgcttgacgtgtccatcggcatcctgtccacgctgtgcgcgccgttcatgattcctctgctgatgcagtggctcgcctcccagtatgtgaccgtgccggtcgagtccctgttcctcaacgcggtcaaggtggtgctgttcccgatcgcgctcggtgtgatttgccacgccatcttcaaggagaagatcgagaaggtcacggtggcgctgccgatcgtgtcccaggtcgccatcctgctcatcatcggcgtcgtggtcgccgccaatggtccgaagctgttcgtggcatcctcgctgcttgccatcccggtggtcatcctgcacaacctgtgcggctacgcgctgggcttcggcttctccaagctcatgtacaaggtgtatccgaagggcttccgctacgcgcagcagaaggccatcaccttcgaggtcggcatgcaggattccgctttgggcgccacgttggccttgagctccttcgcgtccaacccgcttgccgccgtgccgtccaccttcttcagcgtatggcacaacatctccggttcggtgctgtccagctggtggcgcgagcacgatgacaagcatcagatccacccggattccgacaatggcgagaagggttccgcggccaaggcttcggaagccggggacgccgtcaaggatgagtccgaggaaacggtcaacgcctgaatatgattcgtggcatcggccaggcagcctctgaaccgtacagaacggttcagaggctgttctgttttgacctgtttttccatggcgatgttagattgtgttgctttgcgctgaagttcggttaggtattgaaaatattgggatttaggggtgttttgccccgtgtcatatgttcgtttgcggtatactaaaggtgaaggccggagttgcggatcggtcgagaattcgtcaggtcgcaatgaagcgccgatggccgtgaggcccatgcgcaacgccttcaagatataactgaagaacaaccgaatatagcgattcgagatggcggcataggcagtacggcgaggacgccgggccgcatggggttatgaaaagactcagaggtttgaagcgatgcgcgcaaggtggcgcgtgggagagtggctccgatgccaggatggcgtcggagccactcttcgtataacggccgttgctgtcgcgacacgattatccagcattgtccggcagacccgtatactggtaattcgtgtgtgccaacggcatgccttatgtaacaggcgtgcgggttgggatatcccggaactcgattgcatcacgcgcagcaatgcggcggtgagagagggacgggccatcgggccggtggactgtggctatctttacgattcagtgtcgtggagtgtgggtgcagtgcggcggtcacacgaaaccaagagaaaccactgaatcggagaattcaagttgcctactattgaacagctcgtccgtaagggacgtcaggcaaagccgaagaagtccaagactttggcactgaagggaagcccgctgcgtcgtggcgtgtgcacccgtgtttacaccaccaccccgaagaagccgaactcggcactgcgtaaggtcgcccgtgtgcgcctgagctccggtgtggaagtcaccgcatacatcccgggcgaaggccacaacctgcaggagcactccatcgtgctcgttcgcggcggccgtgtcaaggatctgccgggtgttcgttaccacatcgttcgtggcgccctcgatacccagggtgtgaaggatcgcaagcagggtcgttccctgtacggagcaaagaaggcgaagtaagagatatgtcacgtaaaggaccttccaagaagcatcagctgctgccggatccgatctacggttccaccgttgtggcacagctcatcaacaagattctgcttgacggcaagaagtcgatcgccgaggacatcgtctacagcgctctcgacatggtcaaggagaagaccgaccaggagccggtcgccgttctcaagcgcgctctggacaacatccgtccgtccctcgaggttcgctcccgccgtgtcggtggcgctacctaccaggtcccggtcgaagtgaagccgggccgcgccaacacgctgtccctgcgctggctcaccgacttctcccgcgcccgtcgcgagaagaccatggctgagcgtctggccaacgaaatcctcgatgcctccaacggcctcggtgcttctgtcaagcgccgcgaggatactcataagatggcagaggccaacaaggccttcgctcattaccgctggtaattagtcgagaacgagagttaaggaacaatcatggcactagacgtgctcaatgatctcaaccagatccgtaacatcggcatcatggctcacatcgatgccggtaagaccactaccaccgagcgtattctgttctacaccggtaagaactacaagatcggcgagacccacgatggcgcctcgacgatggacttcatggctcaggagcaggagcgcggcatcaccattcagtccgccgcaaccacctgcttctggaaccgtcagacccatgacgagaagcagaagttccagatcaacatcatcgatacccctggccacgtggacttcacggccgaggtggagcgctccctgcgtgtgctcgatggtgctgtcgccgtgttcgatggcaaggaaggcgtggagccgcagtccgagaccgtgtggcgtcaggctgacaagtacggcgttccgcgtatctgcttcatcaacaagatggataagctcggcgctgacttctactactccgtcgacaccatcaagaccaagctgggcgcgaccccgctggtcgtccagctgccgatcggcgctgagaacgacttcgccggcgtcgtcgacctgatccgcatgaaggcctacgtctggaacgacgtttccggcgatctgggtgcccactacgacaccaccgacatcccggccgacctgcaggacaaggctgagcagtatcgttccgagctgctcgaccaggtcgccgagtccgacgaggagctgctcgagaagtacctcgagtccggcgaactgaccgaggacgagatccgcgccggcatccgcaagctcaccatcaaccgtgaggcctacccggtgctctgcggctccgccttcaaggacaagggtgtgcagccgatgctggacgccgtcgtcgactacctgccgagcccggaggacgttccgtccatcgtcggcttcgacccgcaggacgagtccatcgagatcgaccgcaagccgaccaccgatgatccgttctccgcactggtcttcaagatctccacccacccgttctacggcaagctcgtgttcgtgcgcgtgtactccggttccgtcaagccgggcgacaccgtcctcgactccaccaaggagaagaaggaacgcgtcggcaagatcttccagatgcacgccgacaaggagaacccggtggatgccgccgaagccggcaacatctacaccttcgtgggtctgaagaacgtcaccaccggtgataccctgtgcgacgagaagtccccgatctccctcgaatccatgaccttcccggatcctgtgatcgaggtggccgtggagccgaagaccaaggccgaccaggagaagatgagcatcgctctggcgaagctgtccgacgaggatccgaccttccaggtgaagaccgacgaagagtccggccagaccctgatctccggcatgggcgagctgcagctcgacatcatcgtcgaccgtatgcgtcgtgaattcaaggtggagtgcaacgtcggtaacccgcaggttgcataccgcgagacgatccgcaaggccgtcatgaaccaggaatacacgcacaagaagcagaccggtggttccggccagttcgcaaaggtcctgatgaacttcgagccgctcgacaccgagaacggcgagacctacgagttcgtcaacgaagtcaccggcggccacatcaccaaggaattcattccttccatcgatgctggcgtgcaggaagccatggaatccggcatcctcgccggcttcccggtggttggcgtcaaggctaccgtcaccgacggccaggtccacgacgtcgattcctccgaaatggccttcaagatcgcaggttccatgtgcttcaaggaagctgccccgaaggccaagccggtcatcctcgagccgatcatggccgtggaagtgcgtactccggaagagtacatgggcgatgtgatgggcgacatcaacgcacgtcgtggttccatccagtccatgaccgactccaccggtgtcaaggtcatcgacgccaaggtcccgctgtccgagatgttcggctacatcggcgatcttcgctccaagacccagggccgcgcaatgttcaccatgcagatggactcctacgctgaggttccgaagaacgtctccgaggagatcatcaaggcccagcgcggcgagtgacacgcgctgccactgaagtggaaactgtctccagtcagcgctagtattttgtagcgctgactgggttcgggctccaaagtggcacaaacccgtcaaacccagtaaaatgtagcgagtgccttgaagtgagttcaaggcttactacgagacgtccaggaggacaaacacatggcaaaggaaaagtacgagcgtactaagccgcacgttaacattggtaccatcggccacgtcgatcacggcaagaccaccctgactgcagccatctccaaggtgctgcacgaggagtacccggatgtcaacccggagtacgacttcaaccagatcgattccgctccggaagaggccgcccgcggtatcaccatcaacatcgcccacatcgagtaccagaccgagaagcgtcactacgctcacgtcgactgcccgggccacgccgacttcgtgaagaacatgatcaccggcgccgctcagatggatggcgccatcctcgttgtggccgccaccgacggcccgatggctcagacccgcgagcacgtgctgctcgctcgtcaggtgggcgtcccgaagatcctcgtcgctctgaacaagtgcgatatggtcgacgacgacgagctcatcgagctcgttgaggaagaggtccgtgacctcctcgacgaaaatggcttcgatcgcgattgcccggtcatccacgtgtccgcttacggcgcactgcacgatgacgctccggaccacgagaagtgggttgagcagatcaagaagctcatggacgccgtcgatgactacatcccgaccccggtccacgatctggacaagccgttcctgatgccgatcgaagatgtcttcaccatctccggccgtggcaccgtggtgaccggccgtgtcgagcgtggtaagctcccggtcaactccaacgtcgagatcgtcggcatccgtccgacccagaccaccaccgtcacctccatcgagaccttccacaagcagatggacgagtgcgaggctggcgacaacaccggtctgctgctccgcggcatcaaccgtgaccaggtcgagcgtggccaggttctggctgctccgggctccgtgaccccgcacaccaagttcgagggcgaagtctacgtgctgaccaaggacgaaggcggccgtcactcgccgttcttctccaactaccgtccgcagttctacttccgtaccaccgacgtcaccggcgtcatcaccctgccggaaggcgttgagatggtgcagccgggcgatcacgctaccttcggcgttgagctgatccagccgatcgctatggaagagggcctgaccttcgcagtgcgtgaaggcggccacaccgtcggctcgggccgtgtcaccaagatcatcgagtagtttctacccgacatcaagacacgcttgaactagcgttttaaagaaacctcccaaggatgcgaatccgagggaggtttctttatatatggaagggcaatgctccaaagtatgcacgccgtggcataatgagcaaggctttttgtaagcttttccgtcagatgaagaaataggtgagttaatttggcacagactaccaatgacatcaagaacggttctgttctgaacctcgatggccagctgtggaccgtcatcaagttccagcacgtcaagccgggcaagggccccgccttcgtgcgcaccaccatcaagaacgtgctttccggcaagatcgtcgacaagaccttcaacgcgggcatgaagatggaattcgaaaccgtcgacaaccgcaacctccagtactcctatgaagacggcgacaacttcgtcttcatggacatgaccacctacgaccagatcttcattccgaagaccctggtcggcgaccaggccaagttcctgctcgaaggcaccgactgcgtcgtgtccttccacgacggcaccccgctgtccgtcgagctgccggcttccgtcgtcctgaccgtcacccacaccgagccgggcctgcagggcaaccgttccaacgctggcaccaagccggccacagtcgaaaccggcgccgagatccaggtgccgctgttcatcggcgaaggcgagaaggtcaaggtgaacaccaccgacggctcctacctcggccgcgagaactgagagtaaggacagcgaagtttcatggcacgttccaccgctcgcaagagggctctgaacacgttgtatgaagcggatgagaagggacaggacatcctgtcccttcttgctgagcgcatcgagcagcccggcgctcagaccccgctgcccgactacgccatcgaaatcgtccgtggcgtggcggagcatatcgccgccatcgacgccatgcttgacgaacattccaccggttggaaggtcaagcgcatgggcgtcgtcgaccgcaatatcctgcgcatcgccgcatgggagatcatgttcaacgatgatgttcccaacatggtggccatcgatgaggcgttgagccttgccaaaacgctgtgcgacgacgattcgccggcgttcatccatggtctgctcagcgcggtgagcgccgatgcggaagccactgaagtggccgaacaaccgaccgaaccttcggctgaataaagccgaaagttaagcgattcggccgggtcgcgagtcctaaccggccgctatccttggtacgaataccttgactataagggggttttggtgaaccagtatgattccgaagccgtgatgtttgaccctcaggatgccgttcttgttctcgaagacggacaggtgtatgtgggcgaaccatacggcgcgatcggcacgaccagcggggagatcgttttcgcgaccggcatgaccggctaccaggaaacgcttaccgatcccagctacgaccgtcagatcgtggtacagacgttcccgcacatcggggacacgggaatcaacggggaggatccggaatcctccagaatctgggtcgcaggctatgtggtgcgcgatcccagcccgaatgtgagcaactggcgcgccaccggcagccttgacgacgatctcgaatccaaccacatcgtcggcatcagccatatcgacacgcgcaagctggtacgccacctgcgttccgccggtgtgatgcgcgcggccatcttctcaggcgacgcgctgctcgacggtgacggcaaactgcgcaccatcgactccatgctcgacgaggtcaaggccactccgcagatgaagggcatgagcctctacgacgaggtcagcaccaaggaagcctataccatcgaaccctgcggcgaattcgaaggcaaggaaccgctgtttaccgtggcggccgtcgatctgggcatcaagtccatgaccccgcatcgcatggccgaacgcggctgccgcgtgcatgtggtgccgtccaccatcaccttcgacgagctccagtcccttaatcccgacggcgtctttttctccaacggtccgggcgacccggaacaggccgatcctgaagtgaatctgctgcgtcaggtgctcgacgccggatatccgttcttcggcatctgcttcggcaaccagctgctgggccgcgcgctcggcttcggcacgtacaagctcaaattcggccaccgcggcatcaaccagccggtcaaggatatgaccaccggcaaaatcgaaatcaccgcgcacaaccatggcttcgccgtggatgcgccaatcggcgaaaccgtcgacgcgccattcgagaacggcaaatacggcaaggtgttcgtcagccatatcgatttgaacgataacgtggtcgaaggcctgcagtgcgtcgatatcccggcgttctctgtgcaatatcacccggaagccgccgccggcccgcacgatgccgcatacctgttcgatcgtttcgttgatctcatgcgttccgtcaaggagggaacccgcaatgcctaagcgcacagacatcaagtccgtgatggtcatcggctccggtccgatcgtgatcggccaggccgcggaattcgattattcgggcacccaggcctgccgcgtgctgcgcgaagagggcattagggtcattctggtcaattccaacccggccaccatcatgaccgatccggaaatggccgacgccacctacatcgagccgatctccaccccgatcctcgagcagatcatcgccaaggaacgtcctgacgcgttgctgccgacgctgggcggacagaccgcgctgaacgcggccatggcgctgggcgaggcgggcgtgctcaagaagtacaacgtcgagctgatcggcgcgtcccttgacgccatcgatcgtggcgaggaccgcgaactcttcaagaaggtcgtggaggaggccggcgccgaatccgcccgctccgacatcgcgcattcccttgaggaagtcgacaagatcgccgagaagttcggctacccgctggtggtccgtccgagcttcaccatgggtggtctcggctccggcatcgcgcacgacgaagacgagctgcaccgcatcgccggcgccggcatccactattccccgaccgacgaggtgctgatcgaggaaggcatcgaaggctggaaggaatacgaactcgagctgatgcgcgacaagaaggacaatgtcgtggtcgtctgcccgatcgaaaacgtcgacccggtcggcgtgcacaccggcgactccatcaccgtggcaccggtcttcaccctgaccgaccgcgaataccagaagctgcgtgacatcggcatcgccatcatccgtggcgtgggcgtcgacaccggcggctgcaacatccagttcgccgtcaacccgggcaccggccgtatcatcgtcatcgagatgaacccgcgcgtgtcccgttcctccgcgttggcttccaaggccacaggcttcccgatcgccaagatcgccaccaagctggccctcggctacacgctggacgagatccagaacgacatcacccagtccacgccggccagcttcgagccgaccatcgactacgtggtcaccaaggtgccgcgtttcgcgttcgagaagttcccgggcgccgatccgacgctgaccacctccatgaagtccgtcggcgaggccatggctctcgcgggcaacttccaggagtcgcttggtaaggctatgcgctccatcgacaagcgtcacatgggcttcaactgggatggtgacaagccgtccgaggacgaggtttcccagctgctcgacgccatcaaggtgccgaccgagcaccgttatctgcagattcagcgtgccctgtggggaggcgccaccgaagagcagatcttcgcggccaccaagatcgacccgtggttcatccgccagttcgcgctcatcaacgagactgcgctggaagtcaagaacgcggagaagctcaccaggaagctgctgaagaaggcgaagctcgccggcctgtccgacctgcagatcgcgcacctgcgccgtctgggagacgagggcgagaacaccatccgtgagctgcgttggtcgtacgacctccgcccggtgttcaagaccgtcgacacttgcgccgccgaattcgacgcggcaaccccgtactactactcctgctacgcggatgagaccgagctgcgtcctcgcgaccgcgaggccgtgatcatcctcggctccggtccgaaccgcatcggccaaggcatcgagttcgactacacctgtgtgcacgccgtgcaggaactgggcaagaactatgacacgatcatggttaactgcaacccggagaccgtgtcgaccgattacgacatgtccgaccgcctgtatttcgagccgctcaccttcgaagacgtgctcgagatctacgaggccgaaaagaagatgggtccgatcaagggcgtcatcgtccagctcggcggccagaccccgctgtccctggccgcccgactgaaggccgcaggcgttccgattctcggcaccacgcctgaatccattgatctggccgaaaaccgtgagctcttcggcgaggtgctgaagaaggccgacatgaacgcgccgcgctacggcaccgcgctgagcctggacgaggcccgcgaggccgcgcacgccatcggatacccggtgctggtccgtccgagctacgtgctcggcggccgtggcatggaaattgtctacgacgacgcccaattgcgcaagtacgtcgatcgcgcattgaaggaagcccaggccgacaccgtcgtgtccggccgtctgccttcgccgctgctcatcgacaagttcctgcaggatgccgtggaaatcgacgtcgacgcgctgttcgacggcgaggagctgtatatcggcggcatcatggagcacgtcgaggaagctggcgtccattccggtgacgccgcctgcaccctgcctccgagcacgctgtccgatgaccagatccgtcgtctgcgtgaaggcacctacgccattgccaagggctgtggcgtgcagggcctgatcaacgtgcagtatgccttcatggccaacactctgtacgtcatcgaggccaatccgcgtgcctcccgtaccgtgccgttcgcttccaaggccaccggtgtggcactggccaaggccgccgcccgcatcatggtcggcgaaaccatccagcagcagcgtgacaacggcctgctcctgccccacggcgacggtggcgacatccatcgtggccagcaggtggccgtcaaggaatccgtgcttccgttcaagcgattccgcactccgctcggcaagaccgtcgacgtgctgctcggaccggaaatgcgttccaccggcgaggtcatgggcttcgaccgcgacttcccgcacgcgttcgccaagagccagctcgccgcatacgaaggcggcctgccgaccagcggcaacgtgttcatctccgtgaacgacaccgacaagcgccagctgccgctgttcgccgcgcgactggtcgagctcggcttcaacatctgggccaccgaaggcacggcatccgtgctgcgccgctacggcatcgattccaagatcgtcgacaagatcagcgtgcgtatggactccgatccagacgacccgatcaccacctaccatgcggagggcagcgtcggcaagaacgtcgtccagctgatcgaggaaggcgcgatcgacctgattctcaacacgccgaactcccgcggttcccgttccgacggctacgccatccgttcggcggctatcgcagccgacctgccgcagttcaccaccatgacggaattctccgccgtgttgatggctatcgaggcggtgcgcaataatgattatcagatcatgagtattcaggatcattccacgcagctgttcgaattggaaagccgtgactaatgatgagtagccccagcagtgaggaagtgaatgcccagcgttcggatttcggtctgcgactgagcaattcaatggccaaatacggcccgttgtgcgtcggcatcgacccgcatcggcagctcctcactgactggggctataacgtcgacgcgttgggtgcggaactgtattccatgcgtatgctgcaggcggccaatggccgtgccgcagctgtcaaattccagttctccatgttcgaacggtacggttccaaaggcatcgccgcgcttgaacgcgtgctctatgcggcacggcagatgggtgtcatcaccatcgtcgactgcctgcatggcggcctgccgaccacgatttccgcgttcgcggacgcctatttcaagccgggcgcgccattgctggcagacgccatcaccctgctgccgtattacggcgcacggtcattgggaggcgtcatcaatgacgcgctcaacaacggcaggggcgtgttcatcgcctcgttgacgtccaaccaggaaggcgccagcctgcagacggcgattcgtcaggcaggcgaatacaagggtaaaacagtggcgtacggcatcgccagcactgctcagaaattcaataagggcaatgatggaatgggttccgtcggccttatcatcggtgccaccatcgggcagtggatcaacgattcgggcgtcgatccggccaagttcaccggaccgattctttcccccggctacggatggcagggagcggagacacgtgatttgaagaccgtgttcaaaggcaccaagggcaatgtgctggtcacggtatctcgttccatcgccacgcatggtcccgacatcgcaaaattgaccgaagccaccgcgtcggtcgccagggatattcggcaggcattgaccgaggctcaaaacgagaacgccgatgatgcggctgacggagacgccgaataatttctttttctgaatagtttcctttttggaaaacaagacataaccaagagtggggatggaatggctgattctcaacatggacgtttgattgtgctctgcggacccgccggagtgggcaaaggcactgttctggggcgcgtacgcgaacagcaccccgaaatctggctgtcggtgtccgccacgacacgccagcctcgtccgggcgaagtggacggcgtgaactatttcttcatgaccgaacctgaattcctggccaaagaaaaggcgggggagtttctcgaaaccgccgacgtgttcggcctcgcccactacggcacacccgtgaaaccagtcgtggaacatctggaacgcaatatccccgtggtcttggaaatcgacctacaaggagcccggacggtcaaacggcgcgcgaaggaactcggcctcgaagtgcttaccgtgttcattgagccgccgtccttcgaagaactgaaacgtcgtctgatcggccgtggcaccgaaacccctcagcagcaggccaaaaggcttgagaccgccaaggtcgagttggccgctgcgccggaattcgacaaacgcatcgtcaataacgtggtcgacgaggccgcagacgagctttggcatatcatcgccgaagagttcggcctgtaatccgtcaatccgactatccagccaataaaaaccggcatacgaaaagggcctgcacgatttcgcgcaggccctttccgtatgtttgaatcaggcgagaccggacagcttgtcgatcagctccggatcacgggtcgctcccttgtcagcggagcgggcgaaggcggcataagccttcagcgcctgagaaaccttgcgatcacgatgggcgacatagccatcgccggcctccagctcggcgcggcgctgagtcagctcctcgtcggaaagctcgacgttcaccgtacggttcggaatgtcgatgttgatgatgtcgccgttcttgatcagagcgatcgggcccttgttcgcggcctcaggcgcgatgtgtccgatcgccagaccggaagaacctccggaatagcggccgtcggtgagcatggccacctgcttgccgatgcccttgcccttcacgaaggaggtcgggtacagcatctcctgcatgcccggaccgcccttcgggccttcgtaacggatgaccagagccatgcccggcttcaacgtgtcgttgaggatgacctcgatggcctgctcctgggattcgacgaccagcgccggtccgcggaacgtccagatctccttcggcacgcctgcggtcttcaccacgcagccgtcaggcgcgaggttgccgcgcagcacggccaggccgccttcggtgaccgccggatggtcgatgtcgtggatggcgccgttgacacggtcacgatcgagcgaatcgaacagcgtggtgtgcgtccacggttcgggggagacgatgtggcccggagcagccagatacatctgcttggcttcctcggtgcaggtgtcgcgcatgatgtcccagtcgttaagcttgtcttccaacgacttgtaatcaatggaatgcacgtcgcggtgcagcttgccggcacggtcaagctcgccgaggatgccggtgatgccgccggcgcggtgcacatcggaaatctcccattcgccggacggcgacgccttgcagatgcacggcacggtgtgggagatacgctcgatgtcatccagtgtgaagtccacgtcggcggactgcgccatggcgaggatatgcagcacggtgttggtggaaccgcccatggccacatccatggtcatggcgttctcgaaagccttcttggtggcaatggaacgcggcagcacggaatcgtcgtcatcgtcgtaatactgcttggcgatcttcaccacctgctcggcggcgcgcttgaacaggtccttgcggtaggaatgggaggccagaatggtgccgttgcccggcagagccagaccgatggcctcggtcaggcagttcatggagttggcggtgaacatgccggcgcaggaaccgcaggtcgggcagacggtcttctcgtaggcgagcagatcctcttcgttcagattgtcatcggcggaggcgtacatcacgtcgatcagatcggtgttcttcttcacggtgccgtcgggcagcacggtggtgccggcctccatcgggccgccggaaacgaacacggtcggaatgttgagtcgcagcgcggccatcagcatacccggcacgaccttgtcgcagttcgggatgcagatcagcgcgtcggcgcagtgcgcgttcacctgatattccacggtatcggcgatgatgtcgcggctcggcagggaatacagcatgccggtgtggcccatggcgatgccgtcatcaacggccatcgtgttgaactcgcgcggaataccgccggcttccttgatggcatcggaaatcagacggcccactttgttcaggtgcacatgtcccggcaggaactcgtcgaaggaattggcaatggcgatgatcggcttgccgaaatccttgccatccacaccggcggcgcggtagagggcgcgagcgcccgcgaatactcgtccattcattagttttgcagatcgcatttccatgcctcctattgtgctggctaaacgggacacgtgttttgtcaagagtcactatgtggaaattttcggaaaaccgtgtgattcccttacaggttggataactacgctggcggagaaggcctgtgggagaggcaaggttgaggtccagtggattgcctatactaatgattttggaaaagaagcttttggcttatctgatgatttggagataatcactatggcattcggcactgagccaaccccgaccggtcttgcggatccgccgatcgacgatttgatggagcatgcggactccaagtacgctctggccattttcgcggccaagcgtgcccgccagatcaattcctatttcacccagctcaatgagggtctgctgcagaacgtcggcccgctggtggaataccagaatcaggagaagccgctgtccatcgcgttccgcgagatcaacagtggtctgcttgaggaaaccctcggcgaggacgatctgaccgaaggcaactgatctacacggttcccatagagggactggcatcatttttcattcgccccgatacctgagcggtgcgctttgaatagtcaacaattaactattgattgcgtctgtgaaggacggggcgtttttcgtgggcgatcacaggatgcgaacggttgggtgttcgcgaaaggagcagccgtatggctgaattgaagttgatttccgccgagtcggtgacggagggccatccggataaggtctgcgaccagatttccgatgcgattctcgacgatatgctcgcgcaggatccgcattcccatgtcgccgtggagacctgcgccacggtcggacagttcttcgtgttcggtgaggtgaccagcgaaggctattccgacatccagaacatcgtgcgctccgtggtgcgcaatatcggctacaccagctcccgcgtgggacttgacgccgattcctgcggtgtgacggtgtcgcttaccgagcaaagtccggaaatcaaccagggcgttgcccggttgagtggcgaggaggagtcgaaggcgtcccgtgaacagcggtatgaggcgcaaggcgcgggcgaccaaggcgtgatgttcggctatgcgtgcgacgagaccgacgtgcttatgccgttgccgattcatctggcgcaccgtctggcgtatcgtctcgccgaagtgcgcaagagcggcgaggtgccgcatcttcgtccggatggcaagacgcaggtgaccatcgaatacgacgacgatgaccatcccgtgcgtctcgacaccgtgctggtctccacccagcacgacccggaagtggaccaggcatggcttaaggaacagctcaccgaacatgtgatccgtccggtgctggatgacgtgctcgccgaccgtgtggcccacgacgaataccgcgtgctggtgaatccgaccggctcgttcatcctcggcggtccggcagccgacgccggtctgaccggccgcaagatcatcgtcgacacctacggcggcgctgcccaccatggcggcggcgcgttctccggcaaggatccaagcaaggtggatcgttccgcggcctatgcggcacgctgggtggccaagaacatcgtggccgccggccttgcccacaaggtcgaggtgcaggtcgcctacgccatcggcgtggccgatccggtgtccatcaacgtggagacctacggcaccgagatcggtgtgacccgcgagcagatccagcaggcggtgcgcaaggtgttcgacctgcgtcccgccgccatcatcgacgagcttgacctgaagcgtccgatctactccaagaccgcggcctacggccatttcggtcgcgaggatgccgacttcacttgggaagccaccaacatggtcgacgaactcaaggaggccatcaaggcttgaaaacgcggccgacgtcctacgatgaaacaggcgtcggcgcatgcgttacccttgcattatgaccaatgaggatgccgagcagctggcgcttgacgggcttgccccgcgcaagcggcgcaaacgcgcgcccgccgtcaaaacgccagccgccgaacatcccatagcccaagtggtgctggacatccaggccacacatctgggacagaccttcgactatttcgtcgaggaaaaatactctgcggccgcccaacccggcgtgatggtgcgcgtccgcttcggcgggcagcgggtcaacggcatcatatggaaacgcgccgataccagcgccacacccgaatcatcgatacgttacatcgaacgtgtggtcaccgaccgtgtgctcgttcccgaatccatgcgcgacgatatgacgcgcatcgcggacgcgttcggcggcacgcgcgccaatatcctccgcctggcagtgccgacgcgcgtggcaaaagtcgaaagccagctgcgcgtcggcaatcgcgatgccgcaggaaccgcggcgggcaaacaacggctcgccgccgtcgaccaggagatatacggccagttgcaacgtcaatacggcaacatcaatctgctgcatgacgcgctgcaaggcagacgtttccaatcgttcgtcttcgacctgctacccggtgccgaccattggcggcgctgcgcggcatggatggtggccgcggcgctcgctcagaacaagccggcggtgctggtgctgccgaccatgcgggagatcgccgacatgactgagaccctacggtcggtcggcttgaaaccattcgctccgactggggccgcgaacggcgtctatgacggcgatttcgcggtgctcaacgcgcagatggcgccagccgaccgttaccgggcatatctcgcgatcagctgcggacaagtgcgttgcgtgctgggcacgcgcgccgccatgtacgcgccggtggaaggcaacgcgctgttcctcatccttgatgacgtgtgctaccaggacgccgacggcatgatgccgtacgccaacgcgcgcggtgtgcttcggctccgcgcgaaatcgcataacggcgtgttcgtcgcgatggccaatgcgcgcagcgcgcaaagccaatgggaaaccgacgcggcgcacgtcggagacacgcaggtgagcggcttcagcacgcccatacacgcgttgccggccgtgaccaaggaagcgtctccatggattcgctggctcaatcgcgacgagctggcacgactcgccgatccgaccatcggcgcacgcgtgccacacaccgcggtccggatactgtccaaagctttggaaaccggtccggtgctgctgtccataccgcaggacggcatcaccgaagcgttaagctgttcgaaatgccaccgccaagtacgatgcgcgcgttgcacgggaccattggaacggttggcggacggaacgattcgatgccgctggtgcggcgccgccaccgtgcaatggtcatgcccgacatgccataacgagcgcatgcgcgtggtcagggtcggcgccgccggaaccgcgatggaactggccagactgttccgtggcgtgccgatggtgctgtccacgccaagccagccaagaggcgtcgtgtccgatatcggattcgctccgcaactggtcatcgccacgcccggcgcggagccgcgtgtgcgcggggagagtccggcacaatgcgaataccgtgccgtggccatcctcgacgcgtggaccagtttgtatgcgtccggcatcgacgccgatgtggacacgttgaccggatggatgcgcgcggtgtcgctgtgcgcgccgcggacccgtggaggacaggcgctgctgatcggggaaacagatcccgtgctcgcacgatcgttgatgctgtggaattcgccgatgcttgcccaagtcgaagtggaggaccgcgcccagaccgcgctgccgccggtattcgccgcggcctgcgtgtggggccgacgagatgcggttgggacgatgttgaaacgaatcggcgcgttggccggcggcgacatggccaccatcgacacgatcgccggtacgatgccgtccgtcttggggccggtgccgattccgcagccacgcaccatcgattcacgtgaattggaaggcaccgcggacagggtcaaagcagtcgtgcgcgtcccacagggcagacgtgccgaattggcgttgcggctgcgttcggcaagcgcccgccacgtggcttcacgcgaacctggggaactgcgattccagatggatccgaaggaacgcatctgacggacgtcccctcaacgtgaaacactggaacgactgatgacgttgacgttaggaatggagaaacgcatgaaaggctggccgggagagccgcaaatggaatatgacgtgcttatggccgacggcaacgccgctgcgaacgccggccggcagatcaccgacgtgatcttcgatttcggcaacgtgcttatctattgggatccggcggcggtgatgaccccacggtactcggacggactggtggaacagttcctcgacaatgacgtttccggcttctacgacatcaacaacgaactggacgccggcatgtccaatgacgatggcgtggctctgatgcgtgaacgccacggagaccagtgggccgatatgatgcggtactatctggacaatttcgtcgattcgctgaccggcgtggtgccaggcgcgcgcgtgctcatcaacgatctgaaagcagccggcgtccacgtatggggcttgagcaactggcagaaggacctgttcccggtggcgctcgaccattacgacattctgtgcagtcttgaggaccgcgtggtgtccggttacgtgggactgcgcaaaccgcaccgcgatatttacgattacgctctaaaacagttcggcatcgacgcttccggcgcgctgttcgtggatgacaaggcgatgaacatcgtcggcgcgaacgaagccggcattcgcggcgtacggttcaaggatgcccgcgcgttgcgcaccctgctgatcgacgcgggcgtggcgattcccgcggtacatgaaaaataacgacatacgcagattagacagacggttgtgcttgcggtcgctatgcgggatcgacgcatacggtcgcatgcattgatggatatgaaggtgaggagattcgtctcatgttgaaagtgctgttcgcaggtacgccggatgtggcggtgccgtcgttgaaactattggcccaggataccgagcatttcgaagtggtggccgtgctcaccaggccggacgcgccaaccggacgaggtcgcaaactggtggcgaatccagtcaagcaggccgcgctcgaactcggtctgccggtcatcgaatccgatccgagcgaggaaacgttcgtgtccgagcttgcggccaccggcgcacaggccgccgctgtggtggcgtacggcaagatcctgaaacaggacgtgctcgacgcgctgccgatgggctggtacaacctgcatttctccctgctgccccaatggcgtggcgccgctccggtgcaacgttccatctgggccggcgaaaaggtgactggtgccacggttttccgcattgtgcgcgccatggatgccggtccgattctggcgcaatccaccgtggaaatcggcgcgcacgaaaccgccggcgagcttctgagccgtcttgctgaagatggatcacgcctgcttgcggcatcgttgcaggccatggccaacgatcagatcgctccggtggagcagcctgccggcgcatatgaggtggctcagaagatcaccgttgaagacgcgcatatccgcttcgacgtgccggtattcgccgccgaccgccagattcgcgcatgcacgccgaatccgggagcctggtgcgaactgcatgcccatgcggacgccgaaccggcgaccctgcacgtattgcgcgcgcagccggccgacatgtccaatccgaacgcaccggcatcgcttgaacccggccatatcgtggccggcaagaagaacgtgtgggtcggcacctccaccgagccgctcgagctgctggaagttaaagcgcaaggcaagaaagccatgcgcgccgccgactgggcccgtggcgcccacctcgataacgccttctgtgagtaagatttttgtttctactgtaagtatgtgagtagctgcggcgtccgcgaccggcgggcggcatgcattgacgacacgctccgggccgctcaggccaagtctttacggtcttacaacgcatgccgcccaccggtcgctcgtaggtgcggaaaagttatttgagataatcgaggattttcgccagatcacgttcattgagccggtgcggagcatcctcctgcactttcggtttggcgcagaacgccacgccaagaccggccgcatgaatcatcggcagatcgttcgcgccgtcgccaaccgcaacggtctgcgccatatcgatgcccatccgcgcggcccacgcgcgcaacgattccagcttcgtatccttcgtgacgatatcgcccagcacgtgtcccgtcagcctgccatcggcagcctccaaacggttcgcaatccaataatcgagatgcgcatcggccgcgagacggtccacaacctcgtgaaaaccaccggagaccacgccgaccttccaatcatgcgcgtgaagcgtgtcaatcagttcaagcgcgccatgcgtgaaatgcacgcgatggtagacctcatcgaaaatcgtggtcggcagacccttcaataacgccacgcgtgcgcgcagcgcctcgcggaaatcaagctcgccgttcatggctcgagcggtgacggacgctatctgctcgccgactcccgcggccacgccgagctcgtcgatgacctcttcgtcgatcaacgtggaatccacatccatcaccagcagtccgggagcggacagcgtgggcagggatgccatggatgcgatgttcggcgtttcttgttcaagcatggttccgattgtcggaaatcattaggacaatgggtattcttgagggttgaacgtgttggaaagcgaggtcgacatgaacgatcatgacgaagagacgctcgcgtcgctgcagcaggccaacgaccagctcatggccaagaaccatgcgctggtcaaggcgttgagccgcgccacgcaggaaatgacgaaaaccaaggcccaattgaaccagctggcggggcctcccatgactttcgccaccatggtccgcgtgcattcagccaaaacggacgagcagggcgtgcagcatgccagcgccgaagtggctgccggcgcgagacgcatgatcgtgccgatcgcggcgaatctgcaagcttccaggctcgaaccgggacgtaccgtgctgctcaacgagaacatggtggtggtctcacagctcgacaccgacacgctgggcgcggtgcgctcggtacggcaggtgtgcgatgacggccgcctgctggtcgcggatggcggcggcaacgtgacgttggtccgatgctcgggaacgcttgccaaacaggccatcagcgcgggcgatcgcgtgaacgtcgacgcatctctgcggttcgcgctttcgttggttccccccgaaaacgacgacgatttggttctggaagaagtgccggacgtcaccttcgccgacatcggcggactggacgagcagatagaacgtatccgcgacgccgtgcagatgccgttccagcatcgcgaactgttcgaacgctacgacctgaaaccgccgaaaggcgtgctgctgtacggtcctccaggcaacggcaagacactgatcgccaaagccgtggcgaacgcgctcgccgaaggcaccgacgcgggaagtggcgtgttcctgtcggtcaaaggaccggagctgcttaacaaattcgtgggcgaatcggaacgtctgatccgcatgatcttcaaacgcgcccgcgaacgagcggccgacggcaaaccggtcatcgtgttcatcgacgagatggattcgctgctgcgcacccgcggcacgggcgtttcgtccgacgtggagaccaccatcgtgccgcagttcctgaccgagctggacggtgtggaatcgctggacaacgtcatggtgatcggagcctccaaccgcatcgacatgatcgatccggcggtgttgcgccccggacgcctcgacgtgaagatccgcgtggaccgtccgggcatccagcaggcgacccagatcgtccgccactatctgacagacaagctgccgttgtctccgaacgtggatgcgaaggcgttgatcggcgtgctggtcaacgacatctacgcgcaggacgagcatcggcacctttgcgacatctgcgacgaccatggccagtggcgtccggtgtacctcgccgacgtggtgtccggcgcggtgctcaagaacatcgtggaccgtgccaaaacctatgcggtgaaactgtccatcaccaccggacaggctgcggcgatcggcatcaatctgctggccaaagccgtggacgaagaatacggtgagacccgggacgcgctgctggatgcggatccggaacagtggagccgcatcaacgggcttgaacccggacgggtgaccggcatcagaccggtggcatgaatgccggccggcgtatgaatgctggacggtatggtatggaacgcaatctaaatacggaaaggaacggcgcgatgagcgttcgcagggtcatgggcacggaaacggaatacgcggtctccgcgccaggacaaggccgctacaatccggtgcagctctcgttcgacgtggttggcgccgcctcggatgcgtcacgcagccatatccgctgggactaccggcaggaagaccccgtcaacgacgcgcgcggcaccagactggaacgtgcggcggcccacccggacctgctcaccgacgccccacagctcaacatcaccaacgtgatcgcccctaacgggggtcgtatctacgtcgaccacgcgcatcccgaatactccgcgccggaaacaaccgaccccttcgaagcggtgcgatacgaccgtgccggcgatctcatcatgcgcgccgccgcagccaaggcaagcgagacgacgggacggaaaatcgtgctgcaccgcaacaacgtcgacggcaaaggagccagctggggcacgcacgaaaactacatgatgctgcggtcggtaccgttcgacctggtgacacgcctcatgaccacgcacttcgtctcccgacagatcttcatcggctccggccgcgtcggcatcggcgaacatagcgaaaacgccggctaccagctaagccaacgtgccgactacttccatatgaaagtcggtttgcagaccacattcgaccggccgatcatcaacaccagagacgaatcgcacagcaccgacgaataccgcagactgcacgtgatcgtcggcgacgccaaccgcatggacgtgccacaggccttgaaactcggcaccaccagcatgctgctgtggctgctcgaacacgccgacatggccgaaatcgacttgaacgaggcgctggaaccgcttacgctcgccgacccggtggaagccatgcacacggtatcgcacgacctgaccctggccgccccactaccattggaaacaggtggaaccaccaccgcatggcagatgcaggtcactttgcgtggactggtatatgcggccgtggcaacggtatacggcaccgacacatccggagagccggcatggcccgaccgctccacccgcaacatcatggcgatgtgggggcaggctctcgccgacgtcgccaccgtacgccatgccgacgatgacggacgactgacgatgcgggaacaggcgtcacgtctcgaatggctgctcaaatggcagttgctggagaaactacgccgcaagaccggttcggattggaccgatcggcgcctggccgcggtcgatctgaaatgggccgcgctcgatccggccgattcgattttcacccggcttgccggacagaccgaacgactggtgacggataagcagcttgccgaggcggtcggccaagcgccggccgacacacgcgcatggctgcgcgcggagatcatacgacgtttccccgaacaggtcgttgcggcgtcgtggtcccaccttacggtgtgcggcgagtcgtccggtgatgaaaacgtggagaattcgatggtctcgttggacatgtccaatccgttgaaattcacggaatccttgtgttccgaagcgttcgagcatgtccacactgcgagcggaatcgtggaatccctgcgttgaatctcatgttgtgcgggtaccattgccgtaggtgatggcagaggccatacccatagtcgatgaaccacacggcaggacgcttgagggagagggtgcgtccaagccggttatgaggaaacgaaaaggcatactacatggaattgaggcaagtggccctcgaagtggcccgtatcctgcaggatgcaggcaagcacgcgttgaacgatcaaatgaatccgcgtgatctgaaaagttttgaaataacggacaatcatctgagcttcacctccgacatcgataagcggttggcgcaattcatcagcaaccgcatcacgtatgtggatgtgttcgatggtttctggcagttccgtccggaagaatgccatccgggggaacggtattggtgcgttggcggcatcgacggcgcgatcaatttcgtgcgcagcatgccggaatggaccatcaccgtctcactgttcgagttcaacgaccaatgctccgcgcagccgatcctttcggtggtgcatgctccggcgcttggcctgacctacctggcggtgcgcggatccggagccatccgcatccgcaagacgccgcttggagacaaacgcgagaagatcatgccgtccaccaccccgtcccttgactatgcggtggtgagcttcggcatgtcccatgtgccggaggaatccaagcgcgcgcttgaagtggtgtcgcgtatctccggccgtccggccgacatcaagcgcgttggcccctcctccttggatttgtgcaaggtggcggacggtacatatgacgcgtatttcgaagcgcatctgcacaagtgggacgttcctgcggtttccgccggagccgtcgtggtctgggaagcgcaggggcatctgagccggtggaacggcgatcttgtccactggcgtcaggaaaacgacgtactcgccaccaacggtctgattaccgatgatctgcgccagtatttggcataagactgattgactgccccacacctgggttaaggtgtggggcagtatgctattcgcaggagaacccgcaaagacgctttcggagaaaggaaggaccatgccccagaaatttgagcagatgcaatccgccgaacaaaaacatgacgaggatgagaccattgcgcaggctggcacccagatcgatgacacggtcgatgcgcttgacgcggtgctggacgacatcgaatcggtcctcgaatccaacgccgaggaatatgtgggcagcttcgtccaaaaaggcggcgagtgatgccgcagctgcgtgacagcggcaaccattccacagcgccgcttgacgcccataccaaggacgaaatccaatccttcgcccgtattttcggcatcgaaaccgaatacggtgtgagcgtgaccggttcggaccgcccatgcgacgccggacagacggcgatgatgatgttccagccgattgtggccgaagcgagatccaccaacacatatattgaaaacggttcaagactctaccttgatgtcggctcgcaccccgagtacgccacggcggaagcccgggatccgatggacgcgctggcattggatgcggccggcgaattggtgatgagggatcttgccctggacgcccaacgtcgtctgcgctccatccagggagccggctccacggtccatgtgttcaaaaacaatgtggattccgccgggcattccttcggctgccatgagaattacctggtgcgacggttcgtgccgttgaagacgatcgaacaggagctgctgccgttcctgatcacccggcagctgttcaccggcgcaggacgtatgggggagcagggcttccagatcacgcagcgtgccgatttcctcgatgaggcggtctcatcggccaccacgcgctcgcgtccgatggtcaacacgcgcgacgaaccgcatgccgatcctgacgcgttcagacgactgcatgtgattatcggcgattcgaaccggtcccagtgggccacgatgatgaagctcgccaccacgcatctggtgttgtgcgtcatcgaacaggccgggcgcgaaggcaaggattccgggttcgcccgattctccttcgctgacgccagtgcggccaaccataaggtaagccgtgacctgacgggcgtcgaagcgtccttcgacatggcagacggcactgtcatggaaggcggtgccgtagcgattcaggaacgttatcttgaaatcgtcgaacgattcgttggacaacatcccgaagtgtgctcctcgttgccgcgcacggacgtgcatgaggtgattcgccaatggaggcgtgtcatagaggcgttccgctcgggggctagcgaaacgttcgccgacaaggtcgattggcttgccaaacgacggctgttcgacatgctccgcaaccgtgcggggagccgactctccgtcagcaagttggaacagttggacatggactaccatgacgtggccaacggcgcgctgtacgcctcgctgtgccgtcgcggagccatgcgcacgttggtcaacgagtcacaagcacatgaggccatcgatgttcctccccacgatacccgcgccgcactgcgtggacggttcatccagtcggcacgatcgcacaacgcgcaatattcctgtgattggacgcgactatcgctgacctcgccgaacaggatggacgtgacgttgcttgatccgttcgacgcacaaccgtccgaccggttcctcacgatactagaggctttgcagtagccaaaagcctgcgatggaagactcgtctccaccgcaggcttttgatattggttggtcggattgtaactgccgctcagacttctccacggtatttggccatcatctgcgactggagttgttgcgcgcttggcggcgtccacgtgatcgcgtcggcgcccgcatcaatggtggcgagaatacggtcttcacgacctccgcccgaagccagaatcgggatttccggatgatgcgcgcggatgcttgccacgacttgcgcggttcttgcaccggctgccacattgatgatggccgcaccggcaagaatcttgcattcggtgatttcatcatcctccgtgaccgtggcgatgacggggatgtccaccatcgacatggtcgtttcgatggtttccgccggtgccggcgcgttgatgaccacgccggccgcgccctgcatctccgccaccatggccagctctgccacacgcggaccggtggtggtgcctccacccacgccgacgaacagcggcatctgcgccacggtgagcagcgcctgcgtgatcaccggttcgccggtgaaagggtacaccgcgaggatggcgttcgcgttcgtgttgcggataatgaccgcatcggtggtataggcgaacgatttgagcgtatgacctttgacggtgatgccgccgcaacgctgcgtgatgatttccggaaccctggcgttgggggaggtgagtctgccttcgaccttcgccgtaccgtaggtgcttcgcgacacgtgcggcacggctgaatgctgctccacagccactgacgcgctgggggtgaatagcgaacgcttgttgagacggatgagatccggatcgtccgcaccggaatcatgttcctgcccgacgctcattcccgcacctcctcatccgtatggttcagcatgaggaattcgtggatcgccttgcggcgttcggaaatctcctcatccagaagtttggtatcggtgttgtcgatgatacgctgcagcagttcgccgagagtggaaagttcctcgtcgttcaggcagtcgagcatatgaacgtcggcttcgatgggtttggacggcttgggccgtggaaccgttccccgtcttgccgcgtcgacgttccgcacgtgtgtggtggcgcgagccacggtccgggcacgtgtcgttttgagcttggtgtggatgagcaggatgttgagtttgtggatttcgtcgatgatctgtctgcgttggtcgaccatgacatcccccttcatctagtcatattgtctagtatcatagcgcatagtgtgggatgacattgcctttgcctgttataaaaagaaaaaaagagaggttccaaccatccgtggttgaaacctctcatataggtctgcgtggtcgacttacttggtgacggccttcttcagcagggagccggcagagatgcgaacgccgtaggttgccggaatctcgatggtttcgccggtgcgcgggttgcggccggtgcgggctgcgcgcttgacgcgctcggcggagaacaggccggtcagcttcaggccttcgccggactgcattgcctcgacgaacacgtcctggaaagcgttcaccgcagcctcagcctgagccttggtcaggttggacttctgggcgatcttcgagacgagatcagacttgttgtatgccataaagcatccttcttgagtcaggggatattccgcttatgaacatccacgttcattgcaatgatagcgcacgcatgtgccaaaaatgccattttccaagggttttggcccttttgattcagcatagggggagaaaaaaccctaacggggggttgggctagatcaaattatgcctgtccagccagttcatagccacggctcccattggaattctcagccaatagaaggcgattcggtagacgagagtagcggagacggcgatggtggaggggatgcccacggcggtgaaggccacggacaacgcggcttcgaccgcgccaaggccgcctggtgtcggcactgcggaaccgagcgtattcgccagcaggaagatgaatgtggtctccaccggattggtgtggcatccgaaagccatcaatgcaatccagaatcccaatccggtcgagatgttgagcaccaatgcgccgaggatgccgaaggccagctcctttgggtgggacaacacgttgacgagactgcgtgcgtaggacttgacgatgggcaggtacttctccgtgacgatgtgccgcaccgggggaatggccatggccgcggaaatcaccaatgcgacgatggtgatcaccaaaatcagcgtgttggtgggaatcatgccggacagtgtgttgcgtccggtgaagatgccgatcagcagcagcagaatgatggtggtgccgccctgcaccgcccatacggcgctcatgatggcagtggccgcggtattgcggtagccgctcttgcgcaggaactgcaggttgacaaaggccgggccgacgccggcgggcatggagaccgcggtgaagcccgaagccatttgggaacagtacaagccgatcggattgcgtttatcgacatccatgaaacagccaagggtcatggccgatccgaaccaagccagcagtccgaacagcacgcataccagagccatggcgatgttggcctctttgaccgccttgatcatttcggccggttgaatctgggtgaacaccacatacacggcgacgaccagcagcgcgatcgcgatgaaggaacggaaactgaaccgcgacagcgtaaccgtttccatggaatccgcgacctcttgcggagccaaagccgcgatacgggaacgcagcgtgttgagcatgtgcttgtcgcaggcgggcagggcgcgtatcgccgccggaaccgccgccttctggatgaatggcgccaggtcgatcagttgctcgtcgccccacgtcctgcgggcgcatgcgatcgcacggtcgatgccgttcagcgcgccgagcagaaccagcagctgtactttgtccagcgcatagtttggcggcgcgctgccatagtcgccattctgccatcctgcgatcaccggctgtccgttttccatgcgcgacaacgtttcgggagtgattcgacgatgggtgaagccgtgccggtgcgcttcggacagataggtcatgaacaattccatgtcatggtcggacatggtgttcggattgcattccaagggcatgtggtcgcggtgaaacaccagaatggacgattcgctgctgtctgcgactccgtagactcccggcaccgtcaatccggcgttctgcaggccgagaatcatcgcgtaatggtggtggatggcgtcgaaggaggaacggtcacggcgcatggagaccccggtcagcctgacccattgccatagctggttgagatagcctgccatatgcacttggttatcgagaacggataccgtgtattggtggccgtcgacgtcgatggcgtcgtagatgcgtgagttctcggtcagatcatcgtccaatgtggtcttcagcatgccggaatcggtgtaggtcgcgagcctgcgggagagcgacgccacgtcgatgccgatggaacggagcgcctgcgccacctggttgccccaagctccgttggtctgtgtgccgagcatgaaacggatcagcatgcccaaggcacgtcccgcggcaaaggagaccagcacgccggaaagcgaattccatgacagcaccacgaacagcacggcgaccgtgtagaggatgttccagccccatttggtgccggaacgggtgcgacgcggtccggcgacggtaaggaatgaggccatcgccgcataaaaatcgggaagcagtccggttcccacggaagtgccgttggacatcatggacatgatgagggtgtcattgcccgagccgctgataagagcggatatgccccatatcgcagcgaaaccgagaataagggcgatggcggaaaccacactttgcagccattccttggcgatgagcagctggataagcacgctgacggtaatgaaaactatggcgatctgctgcaacagcgatgtcggcacatccatgagccaactgaccacgtggcccgcggaacgcacgtcggactccactccggaggtggtgccatgcaagtagatggagaacaggatgacggccgcgccgacaagcacggcgaacagcgcatggagcagatccgcgaaatcgcggttccgtttcggcggaacatcctcaatgcgcgtttcgtgtttgctggttgggaagtcgtgagacactattgacctgctttataggtacgtgggtgaatacgtccgggtgacatgcacctattatcgtctccgatgatacgccttggggcggctgtgtgaaaacacagccgccccaaggcgtatcatccgcaagatgagtgtggcgatgcgttgtcagcggtcgaagtcaaccagcttgctggcaactccggtgtatgtcgccggagtcaacgccttgagacgcgccgcagtggcttcgtcgaaggcctgctggtcgatgaaccgttcgacgtcatccttggagatctcgtgaccgcgcatgagctccttgaccttctcgtacggcttatccatacccggcagtcctgcaagctcgcaggcgcgcatggcggtctggatcggctcgccgagcacctcccaattggaatcgagctcggcctggatggcaacatcgttcggatggatggagttcagaccacccatcagattgttcaacgccagcagcgaataacccagcgcggagccgatgttgcgctgcgtggtggagtcggtcagatcgcgctgccaacgcgattcgaccagcgtcgccgacaaagtgtccaatagtgagcaggagatctccagattggcttcggcgttctcgaaacgaatcggattgaccttgtgcggcatggtggaggaaccggtcgcgcccttgaccggtacctgcgcgaacacgccacgggagatgtacatccacacgtccacacacaggttgtgcaggatacggttggtgtggctgatggtaccgtacagttcagcctgccaatcatgcgattcgatctgcgtggtcaacggattccacgtcagacccatacggttggtgacgaactcgcgggagacggccacccagtcaacatcagggcaggcggccagatgcgcaccgaacgtgccggtcgcgccattgatcttaccgagatattcctgggccttgaccttgttgagctgacggttcagacgatacacataaacagccagttccttgcccagcgtggtcggcgtggcaggctgtccatgggtcagcgacagcatggccttgtcgcggtaggcgtcggccttctgtgccagatggtcgacaatggcctgggctgcgggcagccacacctgctccacaccgttcttcacgcaacgggcgatggacaggttgttgatatcctcggacgtgcaggcaaaatgcacgagagtcttcaatccggtcagctgggtgtcatgacccaacacatcggcggccttctccagctggtcgtcgatgtaatactccacggccttcacatcatggtgggtcttagcctcataagcggcatgctgggcaatgccttcggctccgaaattctccggaatggaacgcagatacgcctgctcatcatcggtgagcggcttgacacccggaacgatggtctgattgccgttgccctcgaaaccgttggcaagcagaatcatccactcgacttcgacgcgcatgcgctcgcggttcaacgccggttcgctcatgtattcgacaaggggagcggtctgcttgtggtagcggccgtcaagaggggtcagtgcgattgcgggggagatgtcagtaagcttcatagacaacagcatacgttcagccgtgaaccattggtcccgtcatttgctgatgcgtccctcataatactggacctcctccagctcgccttccacgacctcttggaaatgacggtcatggtccagcacggatttgtttccggtgtcgtaggcgtaccggtatcccgcttcatggtatttcgggtagtgcgtggagttcttctccccagacgaatcactgacttcggctcctggaaaagccctcttcggcgcatcctcctcatggacggagcatcgtatggtgagccagttctccgtatgggggttagcctccccgtcaagtgccgcgatgccttcatcatccatctcgatggcggtgacccgtgttttctcgggaatctcgaaattcgctatcggggagccaagcgtggcgatatgttggatgtcgtatttatcttggaaatccgtcgccgccgctgccgcgatgatgccgccctgcgaatggccgacgatttccacgggatcatccggctggatgccggcctgtttcatggtctcatccaggaaacggaggctttccgcggttccgcgctgccgctcatcggcactcatcagctcgaaattggtgtaccagtccataggcgaatcgtgattgccgtcggtcccgggaatgatgatcctccaagcatatgtgccattggctttgcggtacttgcagcatgcgatggttccgtattccagaccgctttcacgttcgccgttgagaggtccttcggacagccgccgttggtcggcgatggcgtccttcgtgcttgtaccgcctctgaccactttggttttcggatacacacgggttacggagagattgtctccatggtctttgtcgaagtacggtatgagcagtctgtcgattttcttaagaccgcgattgaccgagcctttgccggaaagcccctctgctatagccgctcccggtttggtgaccatgaataaggttttcgtgatgtattccaggatggacgtgtcttttgaaggccgttcctgtatgttcaatcggctcgcatgctctccgaggacgctcacgaagctttcctgcatccatgcggtggattccacaagatagaatttgttgaatttcccctctttggcgtaactgcgtcttacccccatcagtgcgctggcggtcaaggcgagaatcgcggattcccgtgatgacatgaaaagcccgcgtaacatgatattcagccctttcctgctggcttcctcagcttgggcgtataaggattgggtttgtgcgatcaatgaggatagctcattaagctgggatgccatggattgcagggcctcggcatgcgcttcgcaacgtccgagcagctgccggtacggcaattcgatatggtcctgcgccgtacaccgtggacttgccccggtcaaagcggacaggagcggtgtggcgcgagggtggattttgagttcatagcctgcggcaatgaaggatctacgggaagtgccaagacgattcgcttggtctctgaggattcttgaagcattgaagtattcccggtattcggcggtggtgaatctctttccgccaacgatgcgggccgtcactcgttggttcatgccgcacctgccgaccagagaagacgtgacgtggcgatcatatcatcacgtagcagagcggattgccgtgcgatgcgatcgagacgggtgcggtattcctcggccgcggtgccggtccagtcggccagtctgttggaggctattgccgcatcaagtccatcgagaagccgtgacgcggtaacaagtttcgcattgatcaatgtttgggtggtccgcacgccaattcggcaacgacaggacattcccgacagggatgccaacgaattgaaggctgcgacgcctggggcggcaccaagaaaagcatttgaaacgttcatggcagccatttgaccacattcggcgttgacgccaatcggaaaacagagcttgtggtcaaagaacgagtctatgaaaaaccgtcggcgtgtcgttattggaaaaacaacgaaaaccacgtcgacggcatgtggataactatattcgaaaaagccccctaccagggtttggtctgcgaggatgacgtgcttgggttctttttcgcagccgaacctgaatcgtcattgggatccgattgcgtggattgggcgttctgagccaatagctcctctattttccgacgttgttcgtcggataggttttcgtcgttcttgtgacttgatttacccgattcctgagcgtcggcggtgtttgaatccgtggaagcggactgatcgctctgctcggctttgatcttcttggacgcgtgatccgtaagctggctggaaacatgactgttatgctcgattgattcgcgcacttggggcagcagcagcggcttcatggctgatgcctcgttgaattgggcgtccgtctgctgttgcctggtgtgcagcttgtcccaatcggcatcgtcttttctgctggtcgagatgttctcctgcaggctttgcgtggcctggttgtagctattgacggctgcgagattcactatggcccatagggcggccatgaccagcaacgccgccatgacggccaaaacgatgcgaaccgtcagcgaggcacgcggtttcatggttgttctggtcatagcaaactcctcgactgaattatccaagcccccaattcgcatgcgagcagcagcagcgtgacgatggccagtggccatacgacgggcatcgtcctggtgcgcttcttggtggtttgggtgactcgccacttatcggacgcttccttggacacgccgtcacgcatggtgttggaggcgttcaacaccagcgcggtaccgctcaactcgtcggcgatggacgccatctcatccttgttcatgcgtgacactccgggtttgccggtatcagggtcggtgacccactggtccgcatttccatcgacgccgtcggcgattacgggaatgttgcctccctgctcgctgccgatggctacggtgaaggcatcggataggtatcgtcgcaatgatgagaacgtgcgccgtgcctttgacgaggtctgttctccatcggaaaacaggtacagcacgatcgcatcatcgggatgctgatcatgaatggacttgcaggtcagcagcagctggtcgataggggcatccaacgtcgaaccggccgaaacggaagtcgcctcgggcgcgagtgtatccgcccaattgtcgatcgcgttcgaatccggggtcaacggcacgtccaacgtgccggaagctccgaatcgcaaagcggcgaaactggaattgggatatagcgcggtgacgtccttcacggcttgttttgccacgtcgagacggcttgactgttcggctgaaccatattgcgcgtctttgacggccatggaaccggtcacgtcaacggccaccaccacgtcggtggcgttcaccgcacggctattggtcggcgccacgatactgggcgtcaatgccatgaccgacaccgtcagacaaagcaatacgcgccgaacgcatgcccaaacggtttcgtcgctgtcagcgcggcgacgaacatgcaatacgatctgcgcaatggcgcaggccagcagaaccacggcgacggctccgccgacaggccaacccaaagcaggggaaagcgtcagatggttcatctcctcaacctccaagccaatgccagccagaccatcaaaacgatggccaaggccagtgtccaccatccgggagcatccaccatggcggccttgttgctcgactcgttttcatggttccgccgagattcgatttccttgaccagcgaagagacggatgctccattcgattgggtgagaaacaccccatgatgagcttcgatggcggatttgaattcctgggtggtctcgtcggcctcgctctgcttcggtccggaaaacaatccatccacggtgatttgggcctgcttggtcaggttcagcgcctcgtcaagcgtataggttggttttccggaaacgacgttgtccgtggcaagcacgatggatgcggcgcgctgacgctcggcattgtcggcgcttgcgttcccataggcgaatccgggaagcatggccgcgcagctcaccacgccatcgccaatcagcgaagtggactccttacggttctgcgtgccttccagccagtcggaaatcgcctgataatcgctgtccttcatcttgtcgatatcgtcttgggactcgacgcctgcgaggatgctgctggctttgtcaagctgtttggacaccagttcgtagtcgtcggtcaacggaaaaacggtacgtgacgtcgaattgaagatgctcaggccgattctctcgcccttgaagctgtcgacgagttgacggtaggtgtcgatgacctcgcggtcgtaggggagcgccgagccggaaacatccaagcacagcacgatgtctcggctgctggccttctcctcgccttcatccacggtgctgggacgtgccaccagagccgtggcgagtgccaacgcgaccactagaagaatcaccgccaaacgtgaaagaaccctccactggcggaataatctcgatgcggattccgtgttgaggtcatcatccaggctgaaggtgcgggcactctcgatgtcatcggttttgtggcgcgcggccaccagcaacgtgacgccggcaacggccagcaccacgatgacgcctgccagaaagacccaaggccaatgccatgacagttgcatctatcgccacctttccacaagattggccacccattcgccagcctgctcgaccgtggcctgcctggcgatgtgattgcgctcggcatccgcgaattccggcggatacaatgcctcgatggtttgcctgagcaaggtgagaccctgctggttccccgtggtccgaggcgtctcttcgatgtcggtgagcgtctggttgcgcacgtccgttccggtggcagtggaagcaaaatccctggcgattgcggccagctgtgcgaaagcctcctcgcgctccagctccccctgggcatggcgggacacaacatcatcgatacgctgatgccagacggttttgccggcaagcgcgtcatgtcggccgcgattgactatttttgcgggcttccggctcggccgggcaagccagaccacaagagccaccaaaacgacggcaagcaacagacagaccgcgatgacgacggccaaaccgttctcaagatgaatctggtccttgatgacgaggtcatcctcggcaaggaagagcatcatgccttgtctcccaacgacaatacggacggggctctcaattggttacgtgtggactgggccaaagccgtggaaaccatgcgcacgaactcatggaacatgcgttcgctggaatcggatcgaattaccgtcgagccacagcgattcagctcatggcgaatggacgcagccaggtattcacgatgcgttcgcacttgcccagctgtgtttcccctacgcaggaacgcaggcacgcgtcgttttccagccccgtcaagcaccacgcgcgcatggctgacatcaaacggattgatggtggccacatcgatgagcaccatcggatgtgtccttgcaatcgtgcggatggcgctcaaatgacgttcctccaacgcatgctcctcggtggcgatgacgaccagcgcctctttgtcccgaatgcggcgtgcgtattccagcaacgcgtcgatattgcggggcctggtccactcgcgctgcaatgccgtatccaaggttcgttcgaactgcgccaggccaccgttgaacggcacccgggtgatggaagcgctgtcgccgaacaccatggacacttcgtcgcctcggcgcaggctgagcgcggcgaacatgcataaggcgtttgccgccacctggtacgcctgttccgaggaagggcatgcggcggtcatttcctgtccgacgtcaagcagcaaccatgccttcgaagtggagggacgctcacgctgcaccaccattggacgtcccgctcgggcactggtcttccaatcgatgcgtttcgcctcgtctcccggctcataggcgtggatatccacgacatcgtcggcgccgaagcgtttgttcgatgcgtgcgcgccttcgagtatgccgagcgccttgcgtaccgtcggcagactcagcgtggttccaagcgtctcgatttttctgcggatcggatcgtcggaacggatctggtcgatcatggaacggggaccgcctgcacgatcgaatccaccacctggtcgctggtgacgccatcagcaagtgcttcgaacgtcatcagaatacgatggcgcaacacttcgtgggcgaacgccttcacatcctcaggaatgacgtaatctcgtccctgcaggagcgcgttggcctgtcctatgcgcaccagcgcgatggacgcgcgcggcgaggcgcccagcctgacgagcgaggaaagtccttggacgggcttggttccagcgccacgggaggtggccgcgatattgaccgcatactgcatgatcgcatcggacacgtgcacacgacgtgccgcggaacgcaggaattcgacgtcgctgatggaaacggtgtcaccggtgagcgcgtgctggtctacggtatcggagccgcggcgggtcagcatggcgagcatgcgttgctcttcctgcgctgtcggataggtcagtacggccttcatcatgaaacggtccatctgcgcctcgggaagattgaaggtgccctcttcctcgattggattctgcgttgcgatgaccatgaatggtttcggcagcgcgatgcgttggcctccgatggtggtcgcgccctccgccatggcttcaagcatggcggactgggtcttcgcgttggaacgattgatttcgtcgagcagcacgaaattggcgtggatcgggccgatctgcgtggagaatttctgcgtggcgaaatcgaagacctgagtgccgaccaggtccgaaggcatcagatcgggagtgcattgcacacgtttgaacgagccggacaccgaagtggccaaggtctgcgcggcagtggtttttgccagacccgggacggattcgatgaggatatgaccgccggccaccaaagtggtgatcagcgattcacgaagattgtcctgtccgaccagggtctgcgcgaaacgtccgtgaatctgcgaaccgatgttcctggcgcgtgcgatgtcttcggccgacagcgtggttggtcttgcggctgcgggcatggggatgggtgccggtgctggcgccggattctttggagggaataaagccatggttgctactctaacgggtcaagctgacgggagggtccaatccaccggctgttctcctgcttcgattagcgcctgattggcgcgggagaacggtttcgagccgaaaaatccgtagcgggcggacatcggacttggatggggggatttgatgatgaaagcgttggtgagcaggggctccaacgtctgcgcctttcgtccccacagaatcgcgaccagaggcttgacgctgccgtcaggccgacggcgattgttcaatgcgctgatggccgcgtcggtgaccacttcccagcctcgcccctgatgacttcccggctttcccggttcgacggtcaggcatctgttgagcagcatgacgccctgcttggtccagggtgtcaggtcgccgttggccggcatgggcacgcccagatcgtcggtcagctcggtgtagatgttcgccagactgcgcggaatgggcttgacgtccggtgccacgcagaagctcagtcccaccggatggcccggcgtggggtagggatcctggccgacgataagcactttgatgtcgtcgaatggaatggtaaacgcgcgcagaatgttcctgctggccggaaggtacttacgtcccgccgcgatttccgacctcagaaagtctcccatgagatgtatctggggttcgacatcggcgagggcctgggcccatccgggctccacaagatccttcaatggtttgatatgagtcatactttcccactgtacgacgtgccctgtggatgtccatgccgattccatgcggaaacgtgtcgaatacgcgcaaaatcgacgatgctgattgtgggctgactgcacgggccggtacactggggcggtaagtgtgagaaatgaggttgcagaaaatggctaagcaggacaaggagacctacgaatcctacgccaaggatatgttcgacaatcctccggcgggaccgatgggcgtgcaccgtggcgcacgttccatggcgtccagggctctgccgtatgtgattgtcgtgattgtggctctgctcgccggcttgctgttctggggagtctattctggtgagatcagcaacctgagaatgccttggtcggccaaggaggactcttcatcgtccgtctccacggcggataaggcggataagaagacggacgacacgtccaaagacgccaagacggagaacaagaagtccgaggacggcaagaagaccagtacttcggatggccagtcgaaggacgcttcggacgccaaccagaacgcggaacagaataacgatcagaacaatggccaggatgcggcttctgagcagagcgtgaatctggccaccgagatccgcgtggtgaacgccaccagcatcaccggttacgccaagagcaaggccgatgccctgacccaggccggatacaccagcgtgacgcccagcaatccgaccggcaacgttcccagccagacggttgtctggtatcagaatgaggccgacaaggcgacggcggagaatgtcgcgcagacgctgggaatctccaatgtccagcagagcagcggattggtcacgccgatcgttgtggtgctgttgaactgaaaaaacgccgtccgaaccggtttggaacctcgcccgaacataggcgaggttcttttattttcttggaaatccggcgtttttcaagttgattcgatgcgactgacatcttgctcacagcgcaaagaacgtcatcgggtttggcactctcgacgtgagagtgctaatctgcgaattagcactcgacgagtgagagtgataactggcggctgacggctggttctgattgtcgctccgaaggtggaaataataccgtgtagccatatgtggaggaacaatggcaaagatgattgcatatgacgacgaagctcgtcagggaatgctcgcgggtctcgacaagctcgctgacaccgtcaaggtcacccttggtccgaagggccgcaatgtggtgcttgacaagacctacggcgctccgaccatcaccaacgatggcgtttccatcgcaaaggaaatcgatctggacgatccgtatgagcgtatcggcgccgaactggtcaaggaagtcgccaagaagaccgatgacgtcgcaggcgacggcaccaccaccgcaaccgtgctggcccagtccctggtgcatgagggtctgaagaacgtcaccgccggctccaatccgattgctttgcgtcgtggcatcgagaaggcttccgaagccatcgtcaaggaactcgtcgcagcggccaaggacgttgagaccaaggaccagatcgctgccaccgcaacgatctccgctgctgatccggaagtcggcgagaagatcgccgaggctctggacaaggtcggccaggatggcgtcgtgaccgtcgaggataacaaccgcttcggcctggaccttgatttcactgaaggcatgcgtttcgataagggctacatcgctccgtacttcgtgaccaatgccgatgaccaaaccgccgtgctcgaggatccgtatatcctcctgacctccggcaagctcagctcccagcaggatgtcgtccatatcgccgagctggtcatgaagaccggcaagccgctgctgatcatcgctgaggacgttgacggtgaggctctgccgaccctgattctgaacaatatccgtggcactttcaagtcctgcgctgttaaggctccgggctttggcgatcgtcgcaaggccatgctgcaggatatggccatcctgaccggtgcccaggtggtgtctgatgagctgggcctgaagcttgattccgtcgacatgtccgtgcttggtaccgccaagaaggtcattgtctccaaggacgagaccaccatcgtgtccggtggcggctccaaggaggatgtggctgcccgcgtcgctcagattcgtggcgagatcgccaataccgattctgactacgatcgtgagaagctgcaggagcgtctggccaagttggctggcggcgtcgctgtcatcaaggtcggtgctgctaccgaagtcgaggccaaggaacgcaagcatcgcatcgaggatgccgtgcgcaacgccaaggccgccattgaggaaggtctgctgcctggtggcggtgtcgctctggttcaggctgcggccaaggctcagaacgatgtcaagcttgaaggcgacgaggctaccggcgcggccatcgtgttccgcgccatcgaagccccgatcaagcagatcgctgagaacgctggcctgtccggcgatgtggtgatcgacaaggttcgctccctgcctgacggccagggcctgaacgcagccaccaacgagtacgaggacctgctggccgcaggcgtcaccgacccggtcaaggtgactcgttccgctctgcagaacgcagcttccatcgctggactgttcctgaccaccgaagccgtggtggccaacaagccggaaccgccggcagccgctccggcagctggcgccgacatgggctactgatcgaaagaccggaagcttccataagctcaaatagctgatatgaggcccgcttcccgatggggagcgggcctttgcttatctggaaggcgccttacgcgcgctttctactgcgcgaacaaacgcgacgcctgcatttcggtctccgaatacaacgtggaggcctgcatcaatgcgcgctggattgattcaagcgactgctccatctgctgctgcgcggcacgccactgttcggcgaccgctgtgaactgcgtcgcagccccgccgcgccaaacgctctgcagattgttgagattgccgtacatgccctgcacggcctgtcggatggattggatggaggcgttgacggcggcgctcgaggactgaatctgctcgctgtcgacttgatactgtggcatgtgccggtcctttcaatgatgattggtgtgtttctccatgcgatcgcggttggcgcaaccggacggtacagtggatgctatgtcatcagtgagcgtgtgcaacgaaaaaaacggagctgtggtcggagaacatatgcatttgggttccgtcggcgtgtcgcgaaacggcggcagaacggcaaaaggttggaatatcgcgatttgcatgttgctggcgagcgtgctgggtttgtgtttgatgctgtggataactccgccggtccatgcggatgacagtgccggattgggcattacagccacggacgacatcaccgacacgcagaatctgctcggttcgaatgtctcggagatcacggacgccatcaaccagacgaaaaaggagaccggcgtcaccgtccgtttggtgtatctggacagtttcaacgccaagggcaagccggataaatgggtgagcgcgctgctggaatcgttgaacccgaaaccgaataccgtgatgttggcggttgcctcgaatgacggtaatctggtggtggccgtgtcttcgaactcggaggaatggctgaagaagaagtcgaccgtcgacgcgctgtccgatgccgcgcaaaaaccgttgatggaaagcgatccggactgggcgaagtccgcgaccgacatgatgaatcagatttcggtgcagaaaaagacctcgacttcgtcgcggaccatatggattggcgtgggaggattcgccggcgcgctgctgcttctggtggtgattctggtggtgttccatatcctgcgcaagaagggcgtgatcgggcatcggcgtaagggccgccatagcggccgtcatggtgcggtcgccgaacgtatccaaccggtcaaagagtggggcgccgaatcggaaaacgaggattatgtcaatccggataccgcttcaacgcaagattcagaatccgttcaggaaacatccagtgaagggagcgatgcttaagccatgagcaagcctattgaagcatccattgtcgttgtcgatgacgagccgtccatccgagagctgctggtggcatccctgcatttcgccggtttcgaagtgaacacggccgcttcgggatccgaagccatcgaggtcatcgaaaggctgcagccggatctgatcgtgcttgatgtgatgcttccggacatcgatgggttcacggtgacccgacgcatcaggcaggaaggcatcaccacgccggtgctgtacctgaccgctcgcgatgacacccaagacaaggtcatggggcttaccgtgggaggcgacgactatgtgaccaagccgttcagcctcgaagaggtcgtggcccgaatccgcgccatcctgcgtcgcacccagcagcaggtggaggacgatccgatcatccgtgtgggcgatctcgaaatcaacgaggactcgcacgacgtgtcccgagccggacagccaatcgacctgagccccaccgaatacaagcttcttcgctacctcatggacaatgaaggccgcgtgctgtccaaggcgcagattctcgatcacgtgtggcaatacgattggggcggggacgcggccatcgtcgaatcgtacatctcctatcttcgcaagaaggtcgatggcatcgtcatcgaggatgagaacggcgacaagcacaaggtaacgccgctgatcgaaaccaagcgcggcattggctatatgattcgcgctcccaagaactagattcagccatgagcaagaatcccaattcgccgtccacgggccacgcctccaatccttcggccattccggcccccatgcagcctccccggtcgctgccgaagcagaacaaggtatggagccgtttcacccgcaggattcaagcgattccgctgagcacgaaactggtcacctgcatcatcgtgctgttgaccatcggcaccatcggcatctccttttccatccgtacgttggtgggcaattatctgctgcagaagaccgatacgcagctgatcaaccaagcccagctgattttcaacagcatggactcgctcagcagcgacaccggcgatgacgggcgcagcctcatgaacacgtattacgtggaggtgcgcgacagcgaatacaaaagcacgggtgccggatcggtgcccatgctccgtgacggagtggtttcggaaccaagtctgccggccgacggcagcatcgacggcgtcactcttggacagccattcacgacacgtgcggtggtgcacatcaccacaagccgcaccccggatcattccatcatgcaggccgcgcagtcgccatggcgtgttgtcgcgttgccttggaacgagaagacacggaccgggcaagtcaaggacagtggcgtcgtgttcatcggcctgtcgttgagcgatcagatcgacacggccaacacattgacgcgattctgcgcgatggtgggcatcgcggtggtgctgatcggcgcgatactcggcaccattctggtgcaaagcacgctcgcgcccttgaagcggattgaaaagaccgccgcgaaaatcgccgcgggagatctcagccaacgtgtgccagacctgccggaaagcacggaggtcggctctctgtccatgtcgctgaacaccatgctgacacgcatcgaggagagcttccacgcgcaggaagagaccaccgaaaaaatgaagcggttcgtctcggacgccagtcacgaattgcgtacgccgctcgccgccattcacgggtacgccgagctgtacaaaatgcagcgcgacatgcctggggctttggagagggctgacgaatccatcgaacatatcgaggcgtccagcgcgcgtatgacggttctggtggaggacctgctgtctttggctcgtttggacgaaggacgtggcatcgacatcacgcagcaggtgaaactgaccttcgtggtgcgcgacgcagccgatgacctgcatgcgctcgaccccgaccgcggcatttcctgcggacaggtcgtgctccaaccaggtaccgatatggatcatcccgcccaattcgccttccaaaatggccagatgccccagattgagttgaagggtgatgcttcgagactgcgtcaagtggtcaccaacatcgtgggcaatatccaccggtatacgccggcggactcgcctgtggagatctccataggtgtgctccccgcgtcgatcagtcccgaatccctatcccgtatgccgtccaacgagcagtcgctgcgccatctggtcgaagccatcgaagtggggcagtccatgcaagtgggtatgaactacgcgattgtgcgattcagcgaccacggtcccggcgtgccgccggaggcacggtcgaagatcttcgaacgtttctacaccgccgacccgtcgcgtgcgcgtcagaagggcggtacgggactcggcatggcaatcgcgcaatccgtggtcaaggcgcatcatggattcatctgcgcatccggcagcgaaggaacgggactgaccctgacggtggtgctgccgatcgccccggtcgaacccaagccgcagccgattacggcgagcgagaatcgaaaaaacgaaaaaaagaatcgcaaatcaaagaaataacgctcttttccgtcgggaaagcagacgctatcggcgcggaaggatgggtgcggcccacctcttgcgctaaactgtatctttggtttgaaaatgggcgaatggttttacctattcgcgtgaaggtatctgatcagcaaaatgtgaggtgacaatgccgagcggacgtgttcgttggtttgatgcgaacaaaggctatggtttcattcagacgggtgagagcacggatgatgtgttcctgcccgctgccgcccttcccgagggcgtgaagacgctgcgtaagggcgccaaggtcgagtattccgtcattgatggtcgtcgtgggccgcaggcgatgggagtgacgttggttgcctcggccccgtcgctggttaaagccacccgtccgaagccggacgatatggccgccatcgtggaggatctgatcaagctgcttgactccgcgggcaatcagcttcgtcgacatcgctatccttcaccggctgaaagcaagaagctcgccacgcttctgcgcgcggtcgccgacaatttcgacgtacaggaatagagtttcatgtccgataccacaatggatcccaaggcaatcgcccaagcggtcgctgtcacagtgtccgacgaggacggtcaggtcggcgacttcgtggaagccatcgacctgggagacaacgtcaccgatttccgcttcgaatcccgagtacgcggctacgaaggctggcaatggtcggtcacgttataccatgatgtcgaactggaccattggacggtcaacgaatcatccctggtcccgaccgacaaggccctgcgtccgccaaaatggattccttggaaggaccgtctcgagccgggcgatttggcggtgaccgattcaatcggcaccgatcccgatgacccccgcatggaagagggcttccgcaagacgcaggatgccgaaacatcggacgatacggaagacaaaccgtcagtcgcggatgaaaccgtacaggaaccggcgatggatggaaacgcttcggatgagtctgagaagacggacgtttcggaggattccgaacagcctgtgacgtccgaagaggatgtcgaagaggcggtcgaggaattcgacctgtcccgcaggcacgtgttgactccgcttggccggtcgcagaccgcaaaacgttggtacgaaggcccacatgggccaaaatcgctatccaccaagacggccgacggcaatccttgctccacatgcggattcttcattccgctgaagggtgagttgaacctgctgttcggcgtgtgcgccaacaagtggagcccggatgacggcagggtcgtgtccatcgatcatggctgcggagagcattccgaaatcgatccgccggagccgtcgcatctgtgggtgcagtcgaagccggcgttcgacgacatgcatatcgatatcatcgcccaggcgccgcgtgacgagcggggctccgtggagctgatcgaacagctttcgtccgatgacgaccataatccgaatgaggatgaggaaggttcggacgcggacatcgaagccaacaccatcgacgacgacgccagccaagaggatgtgcttgagcatgtggcctccgacgatgcgcctgaagtagagaccaccgtcaccgtggtcgacgagaataatccggaaacgtcggacgataccgaatcggctgatacggctgagccgactgaatcggacgagccagtcgaacagactgaacaggttgattccgctgattccgtcaattccgccgggtcggttgagccggttgaacagatggatgagacggtagttgagccgactgctgaaaccaccgggcaaacggaaaacaaatcgatggaagacgaatcggcggaaaccgagtcaacagaagccgaatcggcggaaaccgaaccggcggcggctgaaacaacggaaagcgaaatgacggaagctgattcgtcggctcaagccgaatccgacgaataatcgtcatcgtatatgagagggccacgtacctgaatgtgtacgtggccctctcatatcttgttttcttttttatgcggtcagtgcacgacggtgacggtgcagtctgcgaagttgatgatctgcttggaaaccgatccaaggaaatgcgcgtccagaccggacaagccgcgcgaaccgaccactagatgacgtgcgtagcgggaagccgcgataagccccttcgaggcgggaatatggaaagcgtgcgattcgatttggaaatcgtcgggaatgttcgctgatgaaacctgaaccgaatcgagcaattcatcaagcatgcgttccgcctgcgcctggccgacggagatgggggcgacggcgttctcataccctttgaccacgcccaaatctttcagctgccagcagaacatgacctgcaggggagcgtgatgcagggccgcgaaatcgatggcgaaacgcaaagcgtgtttggaggtctccgaaccatcaacgcctacaaccaccggacgctggttccgaggcaggggagaacccggcatcgtgtaggagaccgtttcctcggtcggcgtaagcgcattggcgatggcgtcctgcacggatgcctcttcatcatcgaggatacgcaccacggtgacgggcaccttcgcctcctctgcaagagaagcggaaagcgatcccagaaaccatcgtgccacgcgtccaagcgaacgacgtccgacgacgatctgttgggcgtccttgccgatttccagaagcgctgccgttccggtggctttgacggaggtgagtttgacgcggttctcgtcaatcgtcatgccttgcgaggcctgggccacccattcgcgcagccgacgggcgatatcatgacgcatctgcgcccattgctcctcatcttctggctgggatcccatatcccatgaatgggtccatgcgtagaccgcattcacctgctgtccggtcagcgatgcttcgccaagagcccaacgcagggctgcgaaggattcatcggacccgtcgacgccgacgacgatgtcgcctcggcgggaatccatcacatcattcgattgcaggatggtgtcgctcatttggtgacctccttggtcgttgccataagtcaagcatatccgtttctttgcgtccatagcgcaatttacgcgccggcggaataaacgtcaccgcgaatcggtagagtgttgaaggactaacaagagtggaaggacaagcatgttcgaacggtttaccgaccgtgcgcgacgcgtgattgtgttggcgcaggaagaagctcggaccctccagcacaactacatcggcaccgagcatctgctgctgggcctgattcgtgagggtgaaggcgttgccgccaaggcattggcctcgaagggcgtgaccttggacgacacccgcaagcaggtcgaagagatgatcggcaagggaaatgcgtcgccgaacggccacattcccttcaccccgcatgccaggcaggtgttggagctgtcgctacgtgaggcgttgcagctggggcacagctatatcggcaccgagcatatcctgctcggtctgattcatgagggcgaaggcgtcggcacacaggtgctgatcaagatggatgtcaaccttggcgaactgcgtagcgccaccatcgatctgatccgaggcaattccagcgacggcaagaacgatagcaagggcgaactcgccaatgccggtggcgtgcaggaccgtcgcaatcagaccggttccgcgattctcgaccagttcggccgcaaccttacggctgaggctgccgctgggaagctcgatccggtaatcggacgatccaacgagatcgagcgtgtgatggtggtgttgagccgccgcaccaagaacaacccggtgctgatcggcgagcctggcgtaggcaagaccgcggtggtcgaaggactcgcgcagaagatcaacgccggtgatgtgccggaaacgctgaaaggcaagcaggtctactccttggacctcggttccatggttgctggttcccgctaccgtggcgatttcgaggaacgcctgaagaaggttttgaaggagatcaagacccgcggcgacatcgtgctgttcatcgatgagattcacaccatcgtgggcgcaggctccgcggatggcgccttgggcgcttccgatatgttgaagccgatgctggcccgtggcgaactgcagaccatcggcgcgaccaccaccgacgagtaccgcaagtacatcgagaaggatgccgcgctggaacgtcgtttccagccgatccaggtgcacgagccgaccatcgccgagaccattgagattctgaagggcttgcgtgagcgttacgagaaccaccatcatgtgacgatcaccgatggcgcgctgcaggccgcggcggaactttccagccgctacattcaggaccgccacctgcccgacaaggccatcgatctgatcgatgaggccggcgcccgactgcgtatccgcaggctcaccgccccgccggagctcaaggaattggacgccaaggctgccaagctggccgaggagaaggaccaggccatcaaggaccaggactttgagaaggccgccgagctgcgtgacaagcaggagaagatcgagtccgagcgcaaggagaaggaatccgcttggcgtgagggcgagtccgatgtgaagatggtggtggatgaggacgtcatcgctgaggtgatttcccagaccaccggcattccggtgttcaagctcacccaggccgagtccaagaagctcatgggcatggagagtgaactgcacaagcgcatcatcggtcaggatgaggctgtgtccgcattgagccgttccatccgtcgcgcacgcgtcggattgaaggatccgaagcgtccggctggctcgttcatcttcgctggcccgaccggcgttggtaagaccgagctggccaaggctctcgccgaattcctgttcgacgatgaggatgcgctgatccgcgtggacatgtcggaattctccgaaaagtacgccgcgtcgcgcctgttcggtgcgcctccgggatacgtcggctacgaagaaggcggcgaacttaccgaaaaggtgcgtcgcaagccgttctccgtggtgttgttcgacgaaatcgaaaaagcccatccggacattttcaacacgctgttgcaggtgctggacgatggccatctgaccgatggccagggacgcaaggtggacttcaagaacaccatcatcatcctgaccaccaacctcggcactcgtgacatcgccaaggccgccaacaccggtttcaacctgggcacgaacaccgaatcgagctaccagcgcatgaaggaacaggtctccgccgaactcaagcagcagttccgtccggagttcctgaaccgtctggatgacatcatcgtgttcaagcagctcaccgaaccgcaggtgcgccagatcgtcgacttggatgtcaagcagctcaacgaccgtctgttcgaccgtcacatgtcgctcgaactgaccgacgcggccaaggatctgctcgcacagaagggcttcgacccgctgctgggcgcccgtccgctgcgtcgcgtgattcagcgcgacatcgaggacgccatttcggagaagatcctgatgggcgacctcgaagatggccagcgcgtgagggtggacgccgaaggcgaaggcattctgggtgagttcacgttcaccggcgaggccttcgaagagccgaaccagaaggataatccggcggaggcgaccgaaacggccgctgaaaccgatgccgccactgaaccgacggcatcgacggaactggctgattccgcgcagtcacagaactgatttccaacgttgccggggtaagaaccccggcaacgcgtatgcaaaaagaccggtgggtttcatgatggaatgtcatgaaacccaccggtcttttttacatatgcctattcgtccagctattcgttcagctggacggttgtggttccgcccgcttccaagcggaaccacaaccgtatcgctctatgggagcgtcattacttgatggcgttcagccactgttccttggtggccttctccgcctcaagcttggccttcttcttcggatcggactcagcggcgatctgggcgttaagttcggcgagctgtgcgttgagctgctcctcgaaggaggacttacgggcgtcggcttccggatcagactgcttccaggcggcatcctcaacagccttgatctgcttgtcgacagcatcaagacggctttcgatgcggtgcatgtcatcgcgcggaacgtagccgatctggtcccattcctcctgaatggcggccaatgcctggcgagcctgcttggcggccttctcatccttgaccggcaccaaagcctcagccttggtcagcagttcttccttcttggcgagattttccttttcggacgagctaatctgctcgcgatcggcctgacgggcgttgaagaacgtgtccgccgcagcacggaaacgtgcccacagcgcgtcatcatcacgacggcccgcacgaccggccttcttccaacgatccatcagctcgttgaacttgcgggaggtttccacccaagcggtggaatccttgatctcctcggcttcggcgatgatggcctccttcgcggccttggcgttgctgcgctcctcatcgcggccctgggcccacttgcggcgggcgctgttgaacgtagtgcgggcggaggagaaacgggaccacagggcgtcggcgtcggccttgtcgagacggacgctattgtgctggtgatcctgccactgctggaacagcgaacggaacttgtccgcggtggaacgccagttggtgttgtcgcccagggaattggccagagcctcggccttctccacaatcgcggtacgttcggccagcgccttggcgacggcggccttgtgagcctcgctcagctcggccttcttggccgctccggcctccttcagtgcttcgaactgggacttgagcgcctcaatatctccgacgacggccggctgctcgatttcggcggaaagcgtcttgatggactcgtcgatctcacggttcttcacattgctggacttgagcctgttggcgaacaggtcgagctttgccttcagatcgagatagcgacgggcatacagtgccagggcctcttccttggaagcgtccggaaactgtccgacctcgcgttctccctcgccttccttcacgaacacggtgccgtcatcggcgacacggccgaacgcttcggtggccttgatatcggcttcggagaatccggtggaggttgcaggacgctgcggagccttcttggcgaaggccgcggggctcggcgcatgcggcttcatggccgctgggctcgggacggccggtttgctggcctgggttgcgggcgtcgctgcctgctcgttggtttcagtggtgttctcggacgcggtgacattctcgtcggccatggccagctccttacgtaagcttcatgtagtgcagaggtgacggtccgtgacgtgcgcttccacaccttgaaaaacgcgcggcattttccgtaacctcatttattatagagaaccgtggctaaaggtgcatctatttcaggatttccagagtggctcccctctgaacgtgttgtggagcagcgtgtcatcgacacgctccgtaatgtattcgagctcaatggcttcataggcattgaaacccgtgctgttgagcagggttccagcctgctcaagaaaggcgagaccagcaaggagatttacctgctgagccgtcttcaggaagtcggacacgagtccgacactccgattgaggatcgtcttggtctgcacttcgatctgaccgttccgctgagccgttatgtcgtcgaacattccggcgatctggcgttcccgttcaaacgttggcagattcagaaggtctggcgtggcgaacgcccgcaggaaggacgtttccgcgagttcgtgcaggccgacatcgacgtgatcggcaatggcgatctgcccgaccattacgaggtcgaattgccgttggtcatggtgtccgcattggaacgtctgcgcgagttcggtctgccgaaggccaccgtgcatgcgaacaaccgcaaactctccgaaggcttctaccgtggtttgggccttacggatatcgaaggcgtgctgcgtgagatcgacaagctcgacaagatcggcgccgatgaggtggccaagctgctcgtcgaaggctgcggcgccgacgaagcccaggcccgtgcctgcctcgaactggccgagctgaccgccgccgacggcaaggaactgtccgacaagttcgacgcattgtgcgccaagcatgacatcgcgtctgattccgacgcctacgtgttggcacgccagggactcgacacgctggcgatgatcgtcgacgaggccgcgcgcatccgtccgggctccgtgatcgccgatctgaaaatcgcccgtggtcttgattactacaccggttccgtgtatgagacgttcctcgacggcgccgccgctttgggctccatctgctccggcggccggtacgacaacctcgcatcgcagggcaacaagaagtacccgggcgtgggcctgtccatcggcctgtcccgcctggtctcctacatgctgcacaccgcgggcgcgcacgccaaccgtgtgtctccggcatccgtgctcgtggcggtatggaatgaagccgaccgctccgcgtccaacctgatcgccaaccagctgcgctcccgtggcatcgcggcggacgtggcgccgaccgcggccaagctcggcaagcagatcaaatatgcagacaagctcggcatcccgtacgtctggttcccggccgacgcttccgaagagggcgcccaggacgaagtcaagaacatcatcacaggagaccagcggccggctgacgcacagtcgtgggagccggatactgtgtatgcccagcaaaccgttaccgttgaagcctgaaatcgcaagacttcgcaacatacaagaggataaggaataggggaagcatgagccagacggcttacagaacacatcatgcaaccgaagtgaccgaacagctcgtcggtcagaaggtgacgctcgccggttgggtcgatcgtcgccgcgaccacggtggcgtggccttcatcgatcttcgtgacaacaccggtctggtgcaggtcgtcatctatgacgaggagatggcccgtccgctgcgctccgaattcgtgatccaggtcgtcggcgaggttcgtctgcgtccggacggcaacgagaacgagcatctggccaccggcaagattgaagtcgtggccgaaagcatcgaagtgctggccaagtccgatgccctgccgttccaggtctccaccgctcttgagaacgagtccgagaacaagctgccgggcgaggacgtgcgtttgaagtaccgttacctcgacctgcgtcgtccgtccatgcagcgcaatctgaagctgcgagcccagatgtcgaaggccgcccgccatgcgctggaggaaatgggcttcgaggagatcgaaaccccgaccatgatcaagtccacgccggaaggcgcccgtgacttcgtcgtgccggcccgtctggtgccgggttcctggtacgctctgccgcagtccccgcagctgctcaagcagctgctcatggtctccggcgtcgagcgttactaccagctggcccgctgctatcgtgacgaggacttccgcgccgaccgccagccggaattcacccagctcgacatggagatggccttcgtggaccaggaggacgtgatggccatggccgaaaaggtcatcgccgccatctggaagtccgccggctacgacatcaagctgccgatccagcgcatcacctggcaggacgccatggacaagtacggttccgacaagccggatctgcgtttcggcaatccgctgatcgaactgaccgattacttcaagaacacgccgttccgcgtgttccaggccccatacgtcggcgcggtgctcttcaagggtggcgcggccacgcctcgccgtcagttcgacgcatggcaggattgggccaagcagcgtggcgccaagggcctcgcctatgtggtgttcgccgagaacggcgaactcaagggccccgtcgccaagaacctgtccgaagaggaacgcaacggtctgaaggaagccgtcggcgccgaagacggcgacgccgtgttcttcgcagccggtcgccgcacctcctcccaggaactgctgggcgccgtgcgtgtcgagcttgcccgccgcgcgggcctgctcaagcccgacgatttcgccttcacttgggttgtggacttcccgctgttcaagccgaccgatgacccggacgacgacgatgtggcagtcggccactccaagtggacctccatgcatcacccgttcaccatgccgtccaaggattggatcgacaagttcgacaaggatccggaacacgccatgtccgattcctacgacatcgtgtgcaacggcaacgaaatgggcggcggctccgtgcgtatccaccgcgacgacattcaggaccgtgtgcttgacgtgcttggcatcacgccggaagaggccgcagacaagttcggcttcctgcttgaggcattcaagtacggcgctccgcctcacgccggcatcgctctcggctgggatcgtaccgccgcaattctggctggcgccgactccatccgcgacgtcatcgccttcccgaaggctggcggcggccgcgatccgctgaccggcgctccggctccgatctccgctgagcagcgcgccgagaccggtgtcgattacgatccggatgaggacgaggactgatacggtttcgcccatagatgaatgaaaaatgtccgaacatcaatgatgctcggacattttttattattcgcgttgtctattttccgtcgctgtcattatagtggagcgtgtttgattatccggcaaccagaaagggttgaagcgcggtatgaaatcgaaaacacaggacaagaagcgactgaacgcggtcggcatgcgcatatgcgcgctgttcgccgtgctcgccgtggtctttgcggcattcatgacgaccgttccgcatgcgctcgcctccgaaactggcaatccggcctcggtcaagggcaagacatataaaatcggcaccgacaccacgttcgcaccgttcgaataccgtgagaacggcaagatgaccggcatcgacatggagctaatccgaggcatcgccaaggaagagggctttaaggtcgagatacagtcgctgggattcaacgccgcgttgcaggccctaagctccaaccaggtggacgtcgtcatagccggcatgtccatcactgacgagcgtaaagcctcctatgatttctcgaatccgtatttccaatccggcatccagatggccgtcgcggccaacaacgacgacgtcaccggctataaggacctcaaaggccggacggttgtggcgaaaaccggctcggagggcgaatcgtacgccaaacagcatgccgacaagtacggttacaaggtgacttccgtcgaccaatcctcaaccatgtacgagatggtcaaatccggcaatgccgtcgcggtgttcgacgattatccggtactggcatatggcgtatcgcagaacaacggtctgaaaatcgtgactccgaaggtgccgcacggcgaatacggcatggccgtgaacaaaggcatgaacgcagatttgctggccgccatcaacgatggattgaacaagatgatcgcttcgggagaatacgagcgaatcgtcgcacaatatcttggcaagcaaggcgcgaaagagcaggccaaatcgatttccggcatgatcaccgacaatggcgacaacagcgccgaacaacagaaggtcggtttcctcggactggtcaaacagtcgatgccggcattgctgacgggcttgaggaacacgctgctgatcacgctgctttccttcgcgatcgcattggtgctcggcgtcgcgttcggcctgatgaaggtttcggaaagcaaaatcgccgcaggattggccaatgtgtacatcgcggtgttccgcggcaccccgatcctggtgtgggcgttcttcttctacttcggcgtgccccagctcatcggacatagcgtgaacatctgggtcgccggcgcattgaccttgtcgctcaactccggcgcgtacctggcggaaatcgtgcgtggcgcagtccaatcggtcgattccggacagatggagggcgcacgttcgctgggactcaaccacaggcaggccatgcgccgagtgattctgccgcaggccagcaaaatcgccatgccttcgatcatcaaccagctggtcatcatgatcaaggactcctcgctactgctcgccatcggcttcggtgagctgctgtaccaggcgcagcagctgtacgcggcgaacttccgcgtaaccgaaacgctgctgatcgtcggcgtcatgtacttcgtggccatcaccatcctgacgtggctggccaacatcgtggacaggaaggtgaaccgatgaacgagaacgacgtgatcatcgacgtcaaggatctgcacaaaagctacgggcagaccgaggtcatcaaaggcgtcgacatgaccgtgcgcaaaggcgaggtgatctgcatcatcggaccgtccggcgccggcaaatccaccatattgcgttgcctgaacggactcgaacaggccaccggcggcaagatcgtggtcaacggacacgatttgacggacagccatgtgaacatcgaccaggtgcgcgagcaggtgggcatggtgttccagcatttcaacctgttcaacaacatgagcgtgatcgacaacatcaccctcgcaccgaaactggtgcatcatgaaacggatgagcaggcccgcgcgcacgccatggaactgctgaaaaccgtaggattggccgaaaaagccgacgccatgccgaaatcgctgtccggcgggcagaagcagcgtgtggcgatcgcgcgctcgctggcgatgaatccgaaggtgatgctgttcgacgaggcgacatccgcgctcgacccggaaatggtgggcgatgtgctcgaagtgattcgcgaccttgccgccaaaggcatgaccatggtgctggtgacccatgagatgggcttcgcacgcgaagtggccacgagggtcatcttcaccgatgccggcgtgatcgaggaagagggaacccctgacgagatcttcaaccatccgaagagcgaacgattgaagaccttcctctccaaggtgctgtgacattgctccggcggcgatccgtttgatgaatatgttcgtcaaacggtatgaaatgtctcatattccggacgaaatgatgtgaacgggcagtataggaaacatgaatttcgcattgctttcttatactgccctttatgtctgaaatgaaagaaaccgaagcgaagcgtcccatcatgccggacgcgggagcggataacaggccgctcgtcgaactgacccatgtcgagaagcattatggcgatctgcatgtgctcaaggacatcaacctcaccgtacgcaaaggcgaggtgctcgtcatcgtcggaccgtccggctccggcaaatccacgatgtgccgcaccatcaaccgtctggaaaccatcgattccggcgatatccgcatcgacggcaaaccgctgccgcaggaaggcaaggaactcgccaaactgcgtgcggaagtgggcatggtgttccaatcgttcaacctgttcgccaacaaaaccattttggaaaacgtgacattggcgccgatcaaggtgcgccacatggacaagaaggaagccgaggacctggccatggatctgctgggccgcgtcggcgtggcctcgcaggcctccaaaatgccgtcgcagctgtccggcggccagcagcagcgtgtcgccatcgcccgcgccctcgccatgcagccgaaggtcatgctgttcgacgagccgacgtccgctctcgacccggaaatggtcaacgaagtgcttgacgtcatggtcgaactcgcccacgaaggcatgaccatgctgtgcgtgacccacgagatgggtttcgcgcgcaaggtggccgacaaggtcgtgttcatggccgacggacagattctcgaacagagcacgccggacgacttcttcgaacatccgaagaccgatcgcgccaaggacttcctgtcgaagatcctcacccactgaagtgacggaacataacgacagaagaaggaacctgatatgaaaccactttcgatcacgacgaaacgcatgttgcgcagagccgtcgcggcattctgcgcgtgcgcgtgcgtgttcgcggtatccgcatgcggcgcggacgaaaccggcaagatccgcatcggcatcaaattcgaccagcctggcctgggcttcaagaagaacggcacctacgtcggcttcgacgtggacgtggccaagtacgtggccaagaaactcggctattccgaagacgagatcgtatggaaggaatcgccgtccaagcagcgtgaggctatgctgcagaacggcgatgtcgactacatcgtcgcatcctattccatcaccgacgaacgcaagaaggtcgtcgatttcgccggcccgtatttcgtggccggacaggatctgctggtacgcaaggacgaaaccggcattgacggacctaaggatctgaacggcaagcggctgtgctccatgaccggcaccacatccgccgtcaacgtcaaggagaagttcgccaagcagacccagttgatggaacagcccggcatggcggaatgcgccaccgcgttgctttccggcattgtggacgccgccaccaccgacgacatcattctcgctggcctcgcatccgcctcacgtggacgcctgcgcgtggtgggcaagccgttcacccaggaatattatggcatcggtgtcaagaagggcaacaccgagctgaagaacaaaatcaacaacgccatcaccgatatgattcaggacggttcttggcaaagggctatttccgacaacaccaggggagtggcctacacgccgaacgccaagtacaatccgccggtgccgaatggaaaggggaataagtgatggacggattcctcgcgttgttcagccaatacaacattcccggcgcgtttctggtgaacatcgagctgaccctgtggtcggcgttgttctccacgattctgggcgtcgtcctcgtgatgatgcgcatttctccgatcgcctcgctccgtaccgtttccggtgcctacgtcgaactgttcaagaacctgccactgaccatcatcatggtgttcatggtgctgggtgcgtacgcgcagctgaagttcagcttctccgacacgttcgccaccaacttcttctggctggccgtgacgggcctgagcctgtacaccgcggctttcgtatgtgaatcgctgcgctccggcatcaacaccgtgccgcttggtcaagccgaggccgcccgcgcgttgggcctgaacttcatgcaggccgccactcagatcatcctgccgcaggcgttccgcggttccgtggcaccgttgggcaacacgctgatcgcattgctgaaaaactccaccgtcgcggcggcggcatccgtggccaccgaaacctcgacgatgatgagcgaaatgatcgaataccacgccgaccaaatcgtaccgatcttcctgatcttcgccttcggctatgtggttctgatcattccgatcggcatgctgaccacgtatctgtccaacaagctcgcggtgaggaggtgacgcgacatggcaagcaatgaaagcgcggtgctgttcgaccagcctggtccgaagggccgcaaaaccatccgtatcgtcaattggatcgcaggcatcatcttcgcggtggtggtcgtgctgatcctcatgcgtctgcacaatccgccggacggcgagaaccagctgagctgggaactgtggaaaccggcgcttgacgccgaagcatggaccgacttctatctgccgggactgtgggccacgatccgcgcgtccgtactggccgtggtcggagccgtggtgttcggcctggtctttggtgtgggccgactgctgccgagcctgctgatccgtaccatttccggcgcgatcgtggaattcgcacgagccgtccccgttctgctgctcatgatcttcttctggcgctggttcgccttcgcaggtctgcccagccccgcgtattgggcggtggtgctcgcgcttgtgatctacaacggatccgtggtggccgagctggtgcgttccggcgtgggcaacctgccgaacggccagcgtgaggcctcgctcgccttgggattgacccgcacgcagtcgctgttgcagatcgaagtgccgcaggccatctacgccatgctgccggcggccgtgacccagctggtcgtcgtgttgaaggacaccgcgctcggctcgatcatcatgtacactgacctgctgcaggaatcacgtcgactcggctccatgtatttcaacatcctacagacgctggtggtggccgcggtcgtctatttcatcgtctgctggctgttgagcaggctggccgaatggctgccgtcgcgcatgcagcagcatacggctgcaccggccgaaccggaaccggtcgcgccgatcgccatcatggatccgtcgaacgtgaaccagatcgccgtggccaaggaaggcgtgccgctgggtggcgcgcagcgtgtctaccatgtgcaccatcgcggcaccaacgcgtccatccaccagtggcgtcagaccaggtacgcccaaggcttcgatgagacgcatccggaaagccaggtcaaattcgacaagaatggacatccgatcaaggacaatccgttcaagacgaagggcgatggcaaggacaagaacaagtccgaagccgacgaatagcaccggtatcgcataacacgcgtaggggtcgtttttccgcgaaatacggggaagcggccccttttgtgtctacgatggactgcacgcatgtggtccgtaccaagcagggaggcttgacatggcggataaaaccaaggatgtgaaaaaagacgacgccagaatgtcgtcgatcgcgaaaacgctgaacaaagtggaagatcggctggaaaaaagcgagaattgcgattccgtcgccgaaggattggcgaacgccgccaaagcgagcgaactactgagctcggtatggacgttgccgccgacccagctattgcgattccatcacgacacgaaggtatcggacatagatggcgattccactcctggttttgacggcaacaaggatgatgccgaacgattcatatccatcagctcgtcggagatcgcccgttaccagcggcttatgtacgccaatggcgtgaaaggctcgcatcggcgactgctgatcgtgctgcaaggcatggacgcgtcaggcaaaggcggcatcgtacgacatgtgttcagccaaggcgacccgatgggcatgcactatcacgggttcggcgcgccgaaaggcgaagaactggaccatgactatctgtggcgcatcaaacgcgagctgccgaacaacggatggatctccatcttcgacaggtcccattacgaggacatcgtcatgccgcgcatctacaaaacgcagccggaagaagtgtggcaggcacggtacgacgaaatcaaccgattcgaatcgcaattgacggccgacggatgcgccatcatcaaaatcttcctcgtggtcagcaaagacgagcagaaacgccacttcctgagccgtctcgatgatccgaccaaatactggaagttcgatccgagcgaccttgaggcgcgcgcccgctgggacgactacatggccgcatggcaggatgtgttcctgcgcaccagcaccgagcaggcgccgtggtatctggtgcctgccgacaaccgctggtattcgagggccgtcgtctccgagctgctacgcaacacgctcaagaacatgaacatgatctggccgccgctcgaagtcgacgccgacgaaatgcgccgtcagttggacacgctgtagtcgaagaagacaacctcgccgctggattgcgtggcgtccaggtcgacggttccggtgatggcccaatcgtggtcgccatcggaatcgtcgatgatctgccgcaccttccaggcgtgctcgctgttctccttgctttcgtcgaggatgaacagttcgccgctgcgtgccttcgcgtcgatgttgacgtattcgtgctcgtcgtagtaatcgtcgagcgtgtcctcccactcgtgcacgccgtagccccagtccttatcgagcgcgccgagctcgtccggcttgtcgaggtccatgagctgcacacggcggaacatggcattgcgcaccaatacggtgagtccacggcgatcctccaccacggcctgttttgcgccgggcgcggcaagattggcggccgcttcggacgcgtcggtatcggttccggcatgctcccattcgtccaccagcgaggagtcgatggaacggaccaccacgcgcagccaggagatgatgtcgtcaagctgctcgtcgcgcttttcctgcggaacggtacgcgccaacgcacggtaggcgtcggacaggtaccgcagcagcgtgccttcggaacgggcgatgttgtagcgggcgatgtagccggtgaaatcggaagcggtctccaccatgtcgcgcaccacggatttcgggctcagccaatagtcgttcgcccacggaacatcatggcggtattcatcgaacgcggcctgcagcatatcctccaacggcttcggataggtgatctcctgaagcctgtccatacgctcgtcatagtcgaggccatcctctttcatgcggatcatcgcctcgtcgcgcgcctgacgttcctgcgcgcgcagcacctgcttcgggtcctccaacgtggcctcaaccatggatatcacatccaacgcatacgtgtccgactccgggtcgagcagttccaacgcggccagcaggaacgggcttagcggctggtcgagggcgaaatcgtccggcatgtccacggtcatgaaataatccttgccgccatcgtcacggtcttcggtctcgatgacgttcgtgtcgaacaaggtctggaagatctcgtccgcgcgggcgtgcaggcgctccttctgctccggagtctgcgccgaatcgtcgataagccggtcgatgcggtagcgggcgtcgccgccctgctccacctcgttcaacaccatggaatgggtgatcttcatatgcggcaccagtgtttccggagccgcgtcgataagcttgtcgaacgtgttctcgttccacgttacgaaaccttcaggagccttcttgcgcttgatcttcttcagtttcttcggatcgttgcctgccttggccagagccttggcgttctcgatttcgaattcgggggcttcggctatgaccagaccctccgtgtcgaagcccatgcgtccggcgcgtcctgcgatctgatggaactcgcgggcgcgcagcttgcgcatcttcgtgccgtcgaacttggtcaacgcggtcaataccacggaatgaatcggcacattgataccgacgccaagcgtgtcggtgccgcagatcactggcagcagtccctgctgggcgagctgctccaccagacgacgatagcgggggagcatgccggcatggtggatgccgatgccggtacgcaacagacgctgcaggatcttgccgaacgcggtggtgaacttcgtgcccttgatggcttccgcgatcgcggcgcgctgctccttgctggacacgcccgtgctggccagcgcgttggcggtctccaacgcggcatcctgagagaaatgcaccacgtaaatcggcgtctcgcccttgccgaacgccaattccaccgtcttctccaacgggtcgagtgtgtattcgtacgtcaacggcacgggacgtggcgcatcggcgatgatatccacgtcggtgtccgtcatgtcctcaagcttgtcggcgattgcgtcgacattgcccagcgtcgcgctcatcaacaggaactgcgtatccggcagcgtaagcagcggcacctgccaagcccagccgcgctcgggatcgccgtaatagtggaactcgtccatcgccacgcagccgacatcggcgtggcggccctcgcgcaacgcctgattggcgaggatctccgcggtgcagcagatgatcggcgcatccgcgttgatatgcgtgtcgccggtgatcatgccgacgttctcgcggccgaaaacttcaaccaagtcgaagaacttctcagacaccagagccttgatcggagccgtgtaataggaacggcggcccgtgcacaacgcggcgaaatgcatgccgagtgccaccagcgacttgcccgaaccggtcggagtgttcaaaatgacatggtcgccggccagcagatccatgatggcctcctcctgatgtggccacggttccacgcctttgacgtcctccacccaggtgaagaaacgctcatagatctcatccgtgtcgatgttgcgctcgccctcgtcccaattcggcgccaacgcgcccagcgagccataattcgtatcgtctgccatgcttgccagtctaccggttggggcgaacgcatgcatcgaacgtgtgttcgaattgttgggtgtgttgcggtacagtggaaagcatgactgacgatttgtttgccgcgatggacgcgccggatgatgtgacgcgcccgcttgccgtacgcatgcgcccagcgagcatcgacgatgtggtggggcaatcacgggtattgggggaggggtcgccattgcgcagactcgccaaccccgcttcgaaaggctcactcaccgcaccgagctccatcatcctgttcggacctcccggagtcggcaaaaccaccctcgcctatatcgtcgccaaacagtccggccgtgtcttcgaggaactgtccgcggtcacctccggcgtcaaggacgtgcgtgacgtgctcaaacgcgcgcacgaacgtctcgtctccgaaggcaaggaaacggtgttgttcatcgacgaggtgcaccgcttctccaaatcgcagcaggatgcgttgctgcccagtgtggaaaaccgcgacgtcaccttcatcgcggccaccacggaaaacccaagcttctccgtcatcaagccgctgctcagccgatccgtggtcgtcaaactcgaatcgctggaaccggacgatctgaaaacgctgatcaatcgcgccatcgcaagcgaacacggccttgacaacgaaatcagaatcaccgacgaggctgtggatgagatcatccgcatggccggcggcgacgcacgtaagacactgaccatcctcgaagccgcggccggcgcgctcactggtgacaaagagcgcaaaaaaggcgcgaaacggcccatcatcacgcctgatgtggtgtcgaaggtcatggacgtggccaccgtgcgttacgacaaggacggagacgaccactacgacgtcatctcggcgttcatcaaatccatgcgaggctccgatccggacgccaccatgcattatctggcccgcatgctgcgcgcgggggaagacccgcgcttcatcgcacgacgtatcatgatcgccgcatccgaggaagtcggcatggccgccccgcaggtcctgcaagtcaccgtagccgcggcgcaggcagtggccatgatcggcatgcccgaagcgcgcatcattcttgccgaagcggcgctcgccgtcgccaccgcgcccaaatccaacgccagctacaacgccatcaacgcggcgctcgccgacgtggacgcggggcttatcggccatgtgccgttgcatctgcgcaacgcgccgaccgcattgatgaaaagctggggcaaccacgagggctatcggtacgctcatgattggccgggcgcggtggcaccgcagcaatatatgccggatgagctcaaagggcgggaatactatcatccgaacgatcgcggctatgagcatgaggtgagcgcgcgcctcgccaagatccggccgatcctgcacggcgaggacgataagggtggacgctgatcctgccggccttggcttctgccgtgctctttctcctacgtgtataatatggatgcggcaaacaacatgtcttgcatccaatgtgggaatgcctaggtgacagtgcaatgtcggaagggggacggcgacgatgcaaaatgtgcatgacgggtccaagcagacgctgatcatgattgtcgatgacgatgcggccttgggggaaatgctgtccatcgttctgaatagcagcggttttgaaacggtgacatgtcaggacgggttgcgtgccgtggagatgttcccgacccttcatccggatcttgtattgctggatatcatgcttccgggattggatggggtgcaagtggcacaccgcatacggcagaccgccaatacaccgattatcatgctcaccgccaaatccgataccactgatgtggtgaagggtctggaagcaggagccgatgattatgtggccaagccgtttgaagtggtggagctgatggcccgtatcaaagcgcgactgcgcacactgcggatgggtgcttcgtcggatggaggggcaatcgaactgccggagttcctgcattgcgggatactcgagatgaaccgtgtgcagcatgttgccagaaaaaacggtatcgatttgcgcttgactccaatggaattcgaattgctttatgtgttggccgcgcatgagggggagcccctgagtcgtacaagcctgctcaagcaggtatggggttatgacgacggcggagatgccaagttggtcaatgtgcacgtgcaacggcttcgcatgaaggtggaatcgaacccggaaaagccgcagattgtgcaaactgtgcgcggcatcggttataagttcgttgcgcctaccgaataagcggccattatgacactacggcaggtgcggaaggcatggcgatgcagaagtcaacgtgctcacaagtcattgcagatcaggatggtcgtattgtcaatgctggtgttttctctgatggcggctttgttgtgccttttctccatgagtgccatcaaagggtctatacaggcgcaggttatggatgagtcccgtagggatttctcctcgcagatcagcctggctcaaaaacagctgagttccgcgaaccttgccgattccagccaataccagcagttgatcggcaatctggcatccgaactgcaaaacaatggatccggcaatctgatcggtgtgtatctgatgagcggtgatgactcgaacattgagggaaagaccttcgtgccagtgtccaccgagccggaatacacaaacctgatatccacggagatgcagaataatctgcaatcggattccgacgattcgatttattaccaggctgtgaatatagcaaaatcggagaaggacacgcctggggccattcttggttcgatgatttcatcgaatggcattggcactgtgaagatattcgcgttgtactcctatcaaacgcaacagcaagctctattgcagattcagttcaacatgctggtcgccgacgtattgttgagtatcgcaatcgtcgtcatcatattttcagtcatgcgttccgtggtcaaaccggtacaggatgtcgcggcttcagccgagaccatggcatcggggaatctggatatccgtgtacgggtgaacaggcaggatgagatcggtgtgctgcagcgttccttcaatgagatggcggactcattggtgcagaaaatcgatgaactcgaaaaagccggcgatatgcaacgcgaattcgtctccgacgtcagccatgagctgcgtacgccggtgacgaccatgcgcatggcggcggacatgttgtcgatgcgcaaggataggtatgatgccacgaccaggcgcacggtggaattgctggacgggcagattcgcagatttcaggagatgctcgctgatttgttggaaatttcgcgtttcgatgccggatacgcggcattggatttggctgaaggcgatgttcgtgaaccaatcagccaagcggttgaacaagtcgcgggcatcgcggaaaccaaacaagtgccgctggatgtccaccttcccaatatggaggtattggcgtgcgtcgatgcgagacgcatctgtcgtattgtacgtaatctgcttgctaatgcgatcgatttcgcagaaggacgacctgtggaggtacgtcttgcggtcaatcgctctatggtcgtcatcagcgtgcgagattatggcgttggcatgaccacgagccagtgcgaaagagtgttcgaccgattctggagagccgatccgtctcgtgcccgcactacgggtggcacaggattgggcatggccattgtgctcgccgatgtgagactccatggcggtgatatttcggttcgttcccagatgggcaagggcacttggtttctggtgacattgccgcgcaatcctgaaaacggcccggtgaatgtggcacaggcaccgattcgcttcagtgccgaggatgaagacttttgtgctgtcggaggattcggcatcgccgacaatggattttccgactatctgaccggtgagcccaatgtcgggaaagggcggaagcagtgaagacgtatcgtatgacacgaatgctggtaacgatgctggtggtgctgctgttcggctgtctgttgccggtattgagcggatgctcgaatgtattgggactgccgaaaagcggggcagtgcaggtcataaaacctgccgagcaggatgtacggagaatattcacgaatccgtcgggacctgtgaaggacgcgcagccggaagccatcgtcaaagggttcttcgatgctctgccggccggtgtgcaaagcgacggttttaaaacagctcgtcggttccttacaggtgcggcttcgaattggtggaattccgatgcggaaacaacggtgtattcaggtgctccgcagattgcccgtaaagccagttttgccgattcctcggcagcgaatgatgagattgcagtgtcggtgcgtctgcaagtccaaggcatgctggattcccacggcgtgtacctagcggttcccgaagagacggaaacctacgatttcaccctttccaaggtacaggggcagtggcgtatcggaaagctgccgtcaggcgttatggtcggtgccgacgatttcaaacaggcgtatcggcaggtttcgctgtaccagctggggacatcgcgtaaggaattgatccccgatgtgcgttggctatgctggcgtgattggcgtgctcgtgccgtggaggaattgcttaatggaagtgcggcgtggctgcgggatgcggtggtcgacaccaatacggagcaggtgaccttgcggtcgaatggcgtgaccgtccatgattcgacgattcggatacggctttcatccgtgatgaatcgaatgaccgatgcggagcgctcggtattggtccggcaactgcggctgtcattgggggacggcagcaaggaaacaagcatcgatgtagtggccggcgggcgaaattactcgcatgccgatgacggttcatcgctggatacgcgatcgacagtggacccaatatacacattgagcgcgggcaacatcgtttcgctgaaatcgtccaatgcggtacgtgtggcgcaggccggcatcgatgacgcagacggattcatcttttcatctgaaggtggtaccgtgcttgaccacagcgggcgtgtgaaacgtctcggagcggatggcgccttgcgggataccatgttctccggtcataagatacggaccatatgcaaaggcagagggaaagagatctgggccgttgacgaatcgacggaggagattgccgtcgacgccgacggcaggacgcgcgcgttgacgattcccggacttgacgatacacaacatgtccgtgcgataagcgtttcgccggaaggcgatcgtctggctttctctctggaatccagcaaacgtgcgaaatccggaataggcatcatcggaatccggcgtggttcggatggagagatggagtcgttggcaaggtcgttcctgcggatctccgatcaatccggagtgtccatgatgaccttctacaacgacatcacttttatctatgccgcgcaatatgagcagaacgaccatacacagatcgcacgacgtcagcttgtgccgggtcctgaaaacaatcagtctcttcccgatgccggagccatcgccatggctaccggtgaggtcaatatgtatcggcgcttcgccgtacttgaccgtttgggtatagtcagaaccgtcgatggctcgttggggggcacatggtccagtgcggattcgcaggttatggctctgtccgcacagtgacgaatacatatgcgataaacaccttcggtacacatgaatctggttatggctccatgagggatattggattgtcgcggtgagaactctgacggcgcgatgccaagttgttaccgaaaagttatcgtatgaggttgagcgttgaggctttcgacacgatactggaatcaccgatggcaaggaaggccatcacaaccagtaacagctcgaggaggagttcatgaagaattggaagaaagccattgcagtctgcgcttcagccgcagctctggtcagcatggcagcatgcggtagctcgaatgccggatcgaaatccgacgatggtggcaagaagacgatcggcttcgtggctgtcggcccggaaggtgggttccgtaccgctaacgagaacgatctgaagaaggcgttcaaggatgcgggcttcaacctggtgtactctccgacacagaacaacgatcagcagaagcagattcaggcattcaacaagttcgtcaacgatgaagtcgatgccattgtgctgtccgccaccaacgattccggttgggacgactgcctggagaacgcggcagaggccgagattccggtcttcaccgtcgatcgtaatatcgatatcaagagcgctgaggccaagaaggccgtcgtgtcccatatcggcccgtccaatgtgtgggccggcgagcaggctgcggaattcgtcaataagagcttctcgactggagccaacggcttcattctggagggtccggcaggcctgtccgttgtgactgatcgtggtcagggctggaagaacaaggccgcggacaacatcaaggttctcgagtcccagtccgcgaactggtccactgatgaagccaagaccgtgaccgccggcttgcttgacaagtacaagtccgacaatccgcagttcatcttcgccgagaacgatgagatgggccttggagcggcgcaggctgttgacgcagctggtctcaagggtaaggtcaagatcatcaccatcgatggcaccaaggcggctttgcagtctcttgttgacggtgacctctcctacgttatcgaatacaacccgatcttcggcaaggaaaccgccaacgcagtcaaggactatctgggcggcaagtccgtcgagaaagacatcgagatcgaatccaagactttcgacgcagccagcgccaaggaagctctggatgccggaacccgtgcatactgattgtgatgggcgacggttctgatacggaacgtcttttcttctcataacccacgaacggtgcgtcgcgatgatggcgcaccgttcactacatcttgggcaaatatcacagaacgataacaattttcgtaaggcgaagacatggcagacaaaaaaccaatcgtcgtgatgaagggcatcacgatcgaattcccgggcgtcaaagccttggacggcgtcaatctacgtctattccccggtgaggttcacgctcttatgggagagaacggcgccggcaaatcgacgatgatcaaggcgctcaccggcgtgtacaagatcaatgccggatccattgaagtggacggcaagccgcagaccttcaccggcactggcgatgcgcagaacgcgggcatcgccacggtgtaccaggaagtcaacttgtgcaccaatctgaccatcggcgaaaacgtcatgctcggtcatgaagtgcgggggccgctgggcatcaattggaagaagacctatgagaagtctaagaagttccttgcccagatgggattagaacatctcgacccgaaggccccattgagttccatctccatcgcgatgcagcagctggtcgccatagcccgtgccatggtgattgatgccaaggtactgattcttgatgagccgacctcttcattggatgccaacgaagtgcaggatttgttcaagattatgcgcaagatccgcgactcgggcgtcgccatcctcttcgtctcccacttccttgatcagatctatgagattaccgaccgattgacgattctgcgtaacggcaagttcatcaaggaagtcatgaccaaggacactccgcgtgatgagctcatcggcatgatgatcggcaagagcgcggctgagctgagccagattggagccaagaaggcgcataaggatatttccggagagaggcccatcgtctccgtcaagcagcttggtcttaagggtactatcaatccgaccgatttggatgtgtatccgggacaggtcgttggcttcgccggtctgcttggatctggacgaacggagcttggtcgtctgctttacggcgcggacaagccggattccggcacctatgagctcaagggcaagaaggtcagcatctccgatccatacacggcattgtgcaacaagattgcgtactccaccgagaaccgtcgagacgaaggcatcataggcgatctgacagtacgtgagaacatgctgatcgccctgcaggcgacgcgaggcatgttcaagccgattccgaagaaggaagccgacgagatcgtcgacaagtacatgaaggaactcaacgttcgtccgaacgatccgaacaagctcatcaagaacctgtccggtggaaaccagcagaaggtgcttatcgcccgctggctggcaacgcatccggatctgctcatcctggacgaaccgacgagaggcatcgatatcggtgccaaggccgaaattcagcaggtagtgctcgatttggccgagcagggcatgggcgttgtcttcatctcgtccgaaatggaagaggtggtcaggctttccgacgacatcgaagtgctgaaggatcgccacaagattgccgaactcgtcaatgacgacaccgtttctcaggaaaccatcgttcaaaccatcgcaaacacgaacgtcaatacaggaaaggaggcatgatgaccgacaagaaagcagagcaggaaaaggactccgtcgtcaagaagctcctgtcttcgaacctcacatggtctgtggtcgcgctgattgtgctcatcatcatctgcaccatctccgaccaccagttcctttctctgagctggaacaagaacaccggaggcctatcgggcccgctgatcaccatgttgcaggaatcggcgcgttatctcatgatcgcaaccggcatgacgctggtgatctccaccgcaggtattgatctgtccgtcggctccgtcatggctgtcgcaggcgcagccgctatgcagctgctgtccgcgggcgtcaacgtctggatggtcattctcctttcgctgctcatcggccttgccatcggctgcatcaacggtgcactggtctctatcctgggactccagccgttcatcacgacattgattatgatgctcgccgggcgcggcctcgccaaggtgatcacctccggccagaacaccgacgccagctccgttgcaggcggcgcgccgcttaagtggatggcgaacggcttcatccttggtattcccgccaacttcgtcattgcattggtcatcgtggcgctcgtcggcctgctgtgccgcaagaccgccatgggcatgatgatcgaatccgtgggcatcaatccggaagcctcccgcatgaccggcatcaagccgaagaagatcctcttcctcgtgtacgcggtctccggcgtgctggcagctgttgcaggtctgttcgccactgcgtccgtgatgcgaatcgacgtggtcaagaccggccaggatctcgaaatgtacgccatcctcgcagtcgtgatcggtggaacctcgctgctcggtggcaagttctccctggcaggcagcgccctgggcgctgtgatcatcgccatgatccgcaagaccatcatcaccctcggcatcgattccgccgcaaccccggccttcttcgcggcagtggtgatcgtgatctgcgtgatgcaggctccgaagattcacaatctcagtgcggaaatgaaacgcaaacgcacacttaaggcacagactaaggtggtggcagcatgacttctgcaacagctactcaggtcaagaagaagacccagaaaatcggtgggcgtcgcattaatgcccagatgattcctaccattgccgcggtggtgatcttcattctgatgatcatcatgggccaggcgctattcggtacctatctgcgacttggtttcgtctcctcgctgttcattgatcacgcgtatctgatcattctggcagttgctatgacattgccggtgttgacaggtggcatcgatttgtctgtcggcgccattgtggccattactgcagtggttggcgtcaagatgacgaatgccggcatctccgctccaatcgcgatggtcgtcatgattcttataggcgtcgcattcggtttgctgaccggcacgctgatcgaggaattcaacatgcagccgttcatcgcctctctggcatcgatgttcctggcgcgtggcatcgcatccatcatctccaccaaggcgcagaccttccccgagaacaacaacttcgatttcatagcgcagaagatcaccatcatcgacaatccgaagatctcccatgatctctacatcaatgtgggcgtgatcatcgcggttcttgtggttatcttcggctatatcctgctgcaccacacccgtacaggacgcactatctacgcgatcggcggttcccgttcctctgccgagctgatgggtcttccggtcaagcgcacgcagtacatcatctatctgacctccgccacgctggccgccctcgcttccatcgtgtacacggccaacatccgctcggccatcaacaccgtgggcgtcggctgggaacttgatgcagtcgcatccgtggtcatcggcggtaccatcgtcaccggcggcttcggctatgtgctcggctccgtcgtcggcgcactggttcgctccaccatcgatccgctgacttccgacttcggtgtgccggcggaatggaccaccatcgtggttggcctgatgattctcatcttcgtcgtgctgcagcgtgcagtgaccgcggtcaacagaaaagaataggaggtgtggtccgaataaaatcatcctgattccttttatcttccttccctgattggaggcggacgagctttctggctcgtccgtctctttttctgtgccacaaaacgtgggggctgatttggacgttgggccaaacgccccatcggttgcacgaggcgcgcgttcgtttcgacggaatcgcatccgttcttcaagacgcgtcggcacctccgtctgattggtcgagcctatgcctacttccatgggcacgcttgacaagcgcggtttgtccggttgaatcggctacactgtgcatttggctattcgatactgatacggcacgtccgccttatgggcggcgttcgagtgcgcgtatgtgtatgccggttggcaaaccttatattccaagcgcatagaaaaacaacgaatcataatggggttgagtccacgatggaacgcaacattggtcggaacatgcaggcaagcgggacaacggatccggtgaatgaggacaatgcggagaatgcgacgcagggcaggagagcgccgcattcggcgccgaactctgatgatgagaggatcagcggtaaactcatcggcgccatcgtggcggtcggctcgctcgccttcatcggtattcttaccgaaaccgtgatgacggtgctgttcccacagttgatgagtgagttcggcgtcgacaccgccacggtgcaatggatcaccaccatctatctgttggtggtggcggccaccatgccgctatcctcgtatctcaatcgcaaggtcgagcatcgcacgctcttcctcgccgcggtgctattcgccgtgcttggctcgctcatcatgatcgtcgggcatgcatttccggtgattctggtggctcgtgtgattcaaggcatcggttcgggcatcgccaccccattgatgaacaacatcatccttgaacagtcgccgcgcacgaaggtcgggcgattgatgggcgtcggatcgcttgtcatcactgtggctccggcgatcggtccgaccgtgggtggcgcggtgtcgagtattctgccgtggcgtgcgattttcgtcatcgtcattccggtggttctgctgatttcgctgcctgtcggtctcaaatgcgtcgagcagcatcgtccgacggaggacgtgcatctgaatccgctgcagttcgtgtcgattgtgctggcattgtgcggtctggtgatgttcctcaaccaggccggtgtggccatttccgccgcggtgtccggcggttccgccatggtgccgggtgttttcgccgtcgcgagtctcgtgatcggtctgggatcgctgctgttcttcggatggtcatcgcgtcgttcgttctcgccgctgatccgtttgggatggttgcgcgaccctatggtgttgctgcatctgatcgcttatatgttgctgccgatcgtcggcattggtttcggctatgtgatcaccaatctcgctcagctgtccttgggcacgaatgcgttcttggctggagcgttggtcctgccgggcgctctgatcggtgcgttctttgctccgatcggcggcaccttgtacgaccgtttcggaccggttcgtccgattctcggagcattcagcctggcgatttgcgggccgatcctgctgctggtcttctccatgcggctcactgcgggcagtcttgccggattctatttcattttcggtctgggatattcattgggctgttccaacatcatgaccaacgcgctgcataatatcgcgccgcagttcacgccggacggcaacgcggtgttcaatacctgcctgcagttcggcggcgccgccggaaccgcattgttctccacagtgctgtccgtggcccaggctggggccggcagggaggggagcgcgtcgttccgacatgccactgcagtcggcggaagctggacgttcgccatcatgatcatgattgtggccgtggcgatttgctgcttggcctcggccttccgtatcgcggcgaagcgtgagtgagttttctccactgtgggcgcaattttgttccccgtcgcttcgaagcggtaggctgtgaaactatagagaacactggaaaaggagacaaggtgagcaaccttagtgcacccctgcccgtcatggctggcgaagacatgccggcaggacccaccgatccgattttcaaccgcctgctcaaggaccgcatcatctggatgggtgaggaagtcaaggacgagatggccaaccgcatttgcgcgcagatgctgatgctggccgccgaggatccgaaaaaggatatctggctgtacatcaattccccgggcggctccatcaccgcgggcatggccatttacgataccatgcagctcatcgagccggacgtggccaccgtgggcttgggcatgtgcgcatccatgggccagttcctgctgagctccggtaccaagggcaagcgtttcctgacctcgcatgcgcgtgtgctgatgcatcagccgtccggcggcatcggcggcaccgccaccgatgttcgcatcaacgccgaactgatcatggacatgaagaagaccatgagcgagttgaccgccgagcagactgggcacaccgtcgaggaaatctaccgcgacaacgagtatgaccactggttcaccgcccaggaggcgttggagtacggctttgtggacaagctcgtttccacccatgacacgatgagcgccaccaagggagagtgaccatggcaagcgaagaagcacagtttgtagcccgcgccgaacgtctggccggaccgaccggtgtggtcggcttccagagggctgcggcgcgtgaggccgcgttcgcaccgcagaaccgttacgttctgccgcagttcgaggaaaagaccccgtacggatacaagaggcaggatccgtacacccgcctgttcgaggatcgcatcatcttcatgggcgtgcaggtggacgacacctccgccgatgacatcatggcccagctgctggttttggaaagtcaggatccgaaccgtgacgtgatgatgtacatcaattcgccgggcggttccatgacggccatgaccgccatctacgacaccatgcagtacatcaagccggacgtgcagaccgtatgcctcggccaggccgcctcggccgcggccatcctgctggccgccggcgccaaaggcaaacgtctgatgctgccgaacgcccgcgtgctcatccaccagccggccatcgaccagggcttcggcaaggccacggagattgaaatccaggccaaggagatgctgcgtatgcgtgaatggctggagaacacgctggccaagcataccggtcgtgacatcgagaagatccgcaaggacatcgaagtggacacgttcctgacggcccaggaggccaaggaatacggtatcgttgacgaggtgctggaacatcgcagctgagcctgcggtggaatgatatcttcacaaatgcaatacccctgccgggtcgcggcaggggtattgtgttttctaaacggcagatatgtgaaacgaagaggttgcgaatgggacgcgtggtcagctacaacgatgcggtgccgagatgcacgttctgcggcaagtccgagagccaggtgcgtaaactggtcaccggttcgggcgcggccatctgcgatgaatgcattgaattgtgtgttgacatcatttccgaggaacgggacaaggacgcccagctcaatatcctgcaactgcccaagccggcacagatcagcgcctacctcgacaatcacgtcataggccaggagtccgccaaaaagacactttcagtggcggtgtacaaccattacaagcgcgtcaacatggaaatgcgcgagtcgtcgcgaatcggcaaggaacggatgcatggacatgacgattcgttcgagggtgtgcaagtggcgaaatcgaacatcctgctactcgggccgaccggcgtgggcaaaacatatcttgcgcagacgctggcccatgtgatgaacgtgccgttcgtcatagcggacgccaccacgctcaccgaggcaggatatgtgggcgatgacgtcgaaaccgtgctgcagcgcctcatccaggctgctgacggggatgtggcgcgtgcgcagcagggcatcgtatatatcgacgaaatcgacaagatcgcccgtaaaagcggcgaaaacacctccatcacgcgtgacgtgtccggcgagggcgtgcagcaggcgctgctcaagatccttgaaggcaccgtcgcctccgtgccggtggaagggacccgcaagcatcgtgaaatggaaaccgtgcagatcgacacccgcgacatactgttcatctgcggtggcgcgttcgtgggactcgccgacatcgtggcgcaacggttgggcgccagggaaagcggtttcggtgcggcctggcatgaccatgaggttcccaagcgtgagctgcttgcgcaggtctccgccgatgatctggctgatttcggattattgccggagttcatcggacgtctgccggtagtcagcgtgcttgaggaacttaccgaagacgatttggcccgaatcctcgtcgaaccggaaaacgcgctggtcaagcagtaccagaagctattcgccgtcgatggggtgacgttgacctttaccgaaggggcgatacggcagattgcggcgacgtcgattcggcggggtacgggcgcacgtggattgcgttcgattattgagaagacgctggaggacaccatgttccgtcttcccagcatggaaggcgtcgaagaggtggtcgtcgacgaagccgccgtcaccggatcgggcactccgaaactattcaaggtgtcgacgcagaaaattcctcgtctacgtgaggcgtaaggccgaaaactcctgcgacacgccgagattttgcctggagttcatttgggtgtatcttattcgagttgccgaaaacaagacaacgttgcgcgagtagcccagcggattagagcagctgactacggatcagcaggtcgcaggttcgaatcctgtctcgcgcaccagccaccagtcatcaggtggcgcaaagaaatgagatgacgttgcgcgagtagcccagcggattagagcagctgactacggatcagcaggtcgcaggttcgaatcctgtctcgcgcacatgaacctccttcgcgaatgcggaggaggctttctttattttccgtggatttttgtgaagcctgcaattgattgcgcgcacagcggagcgcaatatgcggcagggatgaacgccaagaccctccgatacacttgatactacgtttacggatactgcggtcgaacggggaccgcaagacaaggagcatgatggccacatcgaagaggggaacctgggcaacaatccgacgcatagccgcgtccgaccgcatatccggtctgattatgctcggtttcgctcttgccggcctattgctcgccaatctgccgttcaccacgcatgcgttcgaacagcttgagaacttccgtatagccattccacacaccaatatcgacatgggattgggccattgggtgcaggatggcctgctgacggtgttcttcctgaccgtaggcctggaattgaagcaggaactcaccacgggatcactgtccaatcccaaagccgcggccgtgccgatgctgtgcgcggttggcggtatgcttgctccgccggtactgttcatcggcgtgatctcattgtttgcggcggcaggatcagggcaactcgtcatcgcttcaggaacgtcgttctccttcgcacagatgtccaatggctgggcggtgcccacagccacggatatcgcgttctcattggccgtattggccctgttcgccaaagcgttgccgggatccatccgcgcttttctgatgacattggccacagtggacgacctgctggccatcatcctgatcgcggtgttcttctcatcggtgaacgcatggtactggttccttggcatagccgtatgcgcggtcgtctggtactttctggtccgcatgcgcaaggtaccgtggttggccgtggccatcgtgggcgtgctggcatgggtcatgatgttcgaagccggcgtgcaccccactttggccggcgtgctcgtgggactgctcacgccggcccatgagcgtttcggtgagaagatgccgcgtgcggaacgttacgccgacaagctgcagccgttctccgcactgctggcgttgccgatcttcgcactgttcgccactggtgtgcacttcgagtcgttgaccttggcgctgttcgtctcgccggtggtcgttgccgtgatggtggcgctcgtggtcggcaaacctctgggcatcatgaccaccgcatggctgtccacgcacgtgggcggtctgaagatggccaaggggctgcgcgtgcgcgacatgttccccgccgcctgcgcctgcggcattggtttcacggtgtcgtttctcatcgcgtcgctggcatatcaggatgccgaactatcggctgaagcccgtttcggcgtcctggtggggtccatggtcgcagccgtgatctcaggtattctgctgagccatcaatccaaacgattcgaactggaggacggtacgaagcataagcaccataccggcgacgaagatgccatgaacgaagttgagacggtgctggaagacggtaccgtggtggtcagccagataatcggcacccaccaggaacagtaaaagggatttccatatgttgaaagggccacgcattcccatgcgtggccctttcaacatatcgtgccattgcggcacggctgattaatctgattggtctatttcttgacggcaaccagcagaccagtgccggtcggcgtcaacgcagtgacgaaccgttcatccgactccactgtttccagcaattcgcgcatcgcgatggatttggcatcacgattggcgggattcagcacgccgccggccgatgtggccgaatcaaaggcaagtacatcggtgaagacaatcgcggcatgcggtttcagcaggcgtggagcctgcgcgaaagccgccgcataattctccggatcgccggccacgacgattaaatcgtaattctcggcgttcagacggggcagaaacacacctgcggacgcgttcacggcacgcaatgtggtttcggtgtcatcggacagacgattgaacagtttgcgaatcagcgcgatgccctgcgtggacgaatcgacggccgtaagctggcctgcattgtcaagaccgttgatcagctgcatcgtctccaccacggaaccggtgccgatggcgatcaccgacgaggcgtccaacattcgcaccagcatgcgcagcaattcggcctgcgccgcggatccttggggaatgccggcttcctcggccgcggtcctgatcgcattgagttcggcagactggcgtgagaacgcatgatcctcgacgtactcccacgatttcgcgagattggtatatgacgtcctatccatttcagcgctccttgatttgggcgatcagctgccagatctcctcaccgacatcgatgccacgcgggcattcacgcgtgcaggcgcgcaccgactgacacgcggcgatgccatcggcggaatcgatggcatccatacgtgcatccgtctgactgtcgcgtgaatcattgatgaaacgggaggcggcgataagagccgcagggccgatgaacgcctcgccgcctgcatataccggacagcttccctcacaggtgccgcaggctatgcagttgctcagcagctcatacttggcgagctgctggggattctgcagatattcgaatgcgttgatcttgccgtccgcggtggtggcgagttcgccactggcctgcagatacggcttgagtttcctgatttggtcaagcatctggtcgatatcggcgatcagatcacgctgcacggggaaaccgggcagcggtgcgagctcgatgacacccaaatcgtcggcatcctgcgtttgcgcgggttgaacgtcttcgcccgtatgacggaagccgtcctcatccacctgtgcgtcggacggctgctttgcccaagccttcaccgtggcggtgcacagaagcgtaggcgtgccgttgatggacacggcatcggaaccgcacatgccatgaccgcacgaataacggaaggcaagcgtcggatcgatggtgcgcttgactttgagcaggcagtcaagcacggtgtcctccggacgcgccggcaccacgtaatcctgcacccactgcttgcctcgcggacgcctgcgcgtggatccggaatcgccgaagggagagctcttcctagcgaacggcgagccgcctcgttcacggccgcgttcgggacgcggcgtgaacctgttcacccgcaacgtcaccgtttccatgccgttctccatgccgctcatatacctgcctttcgataaaaaaccgtcaaccagtctgccatacgccgtgcccagggtgtcagtattcacgggcctttggcggcatgtccacgatgtgcaccggctgccaggagacctggcaggaaacatccgtcatggaatgggccaggaaatgctcgtcgtcacgctccgggaaatcaagacgcttcaacgatccacgggattcgtgacgcgcatcggaggcggcgagcacggccttgccgagctccaacagatggcgcacctcccagatggcggtgatttcctgattgaacgtgggggagtcggaatgcgcatgcagcgcctcggcacgcggcgtgagcgtatcgtccagcgtagccaacgcctgttcgatgctgttccggtcgcaacgcaccgcgaccgcctgctccatgacggattccaaatcggccatcagctggtacggattgtccgacgacgcatcgtcgtcatcggacggccgcgtcaacagttccttgacctgcgcggaacgcttgtcggcagcctgcgacaccgcgtcgatagatgcttcgtcggcaggctcggccatcggatcgttcactggattatcgacgacacgttcagccatcgccttgcccgaacgggtgccgaagaggcaggcgtccaacagcgagttgccgcccagacgattcgcgccatgcaccgacacgcaggagcattcgccagcggcgaacagaccgtccacgacggcgcgttcgccatcgacccaacggtagacttcgccgtcggtggtgatggggatgccgcccatggtgtaatgcgcggtgggtttgaccggcacatagtcgcgggtcggatcgagatcggcatactgttcgatggtctccaccacctgcggcagcacctcatgcatatgatccgcatcgatgccggtcatatccagccagacacaatccttcggcccatccggattcttcggatcggcgattcctcgtccggcgtcgatttcagccatgatggaacggctcaccacatcacgcgcggcaagatcggcatgccccggcgcgtaatgttccatgaacgcctcgccatcggagtcgcgcagcacgccgccttccgcacgtgccgcctcagacagcagaatgccggtatgggcgagaccggtcggatggaactgcacgaactcgctatcctcaagctgaaggccggcggacaatgtcaacgccatgccgtcaccggtcagatcccacgaattcgacgtggtatggaacagacggccggcaccgccagtggccatcagcacattgcgtgcgtggatggcatgcgtctcgcccttgtgcgtgtcgaacgccaccacgccctcgaccttgccgtggtcttcggaaaccaccagatcggtcacataccattcctcggcgaactcaacgccctcggccacgcactgctgccacagcgagaacagaatctgatgcccgatgcggtcggccgcataagcggcgcggcggaccggttccttaccaaaatccttggtatggcctccgaaacggcgctgcgcgatatggccgtcatcggtacgcgagaacgcgacgccggcatgctccagcgcgatcacagtggcaggagcctgttcggcaagcagcttcgccgcatcctggtcgacaagccagtcgccgcctttgactgtgtcatagtaatgccaatgccaatcgtctttctccacgttgccaaggctggccgcaatgccgccttccgcggagccggtgtgcgaacgcagcggctgcagtttggatatcaccaggacgttcggttcgatgccgtccgcccgcatctggcgcatccgctcgctacggagcattcccaacgctgcggacaggccggccgcgcctgcgccgacgatcactgcatcatacatatcttcaacatgcttcggactcataccaccgattctcgcacaaggtgtgacctcgcacgttcgacgcggctgaggtggaggtgccgggcctgctatcgctgctcggcgatgatccatccggaccgcatgctgatgcggccttcaagctccaaggagcccagttcgcgcatgattcgcgagatgggatattctcccggatgcgtcttgtccattagatcgagcagatcgtcggcggagacgtggccgtttgcttcggcgcaagttttaatggcggcgagtatggcatcgtcggattcgtctgtcgattcctgcggatgttcggtgtcatccggcaggtcgacatgttgcgggcgatgcgcgctatggcatagttcgtcgatctccgccagtgagcagatgatggtggctctgccgtcttggataaggcgattgcagccggtgttatgcggcatggtgatgtctcccggcacggcgaacagattgcggttgagttcgttcgcccagcctgcggtgttgagcgcgccggaacgcgcacgtgcctgcgccacgatcagagtggatgacaatgccgcgatcagacggttgcgcagcaggaaccgtcttgcctccggcacggttccggggcacagttcggaaatcaaagcgcccgaatggctttcgatctgctcgaacaggttctggttgcttttcggaccgatatggttcagtccgccagcgaatacggcgacggtgcgtcccgccagagcggcgctcatttcgtccatggctttgaccgcgccccaatgcgccgcggcgtcggtgcccagcgcgccgccggataccaccagatgtccggcacgcgccatccgaagggccaattcgtgggcgctttgcctaccgtagtcgcttacgccccgtgagccgacgatacccaccggctcggggcatgacaccagcgccttcggatcgcctttgccccataggcagagcggggaggcccagtcggtgcgcagtgaaaggtcgttcagttggctgggccaacaggggtgatgcggggcgatgatccactgcgtgccgtctgctgtgaaccagtctcgcaatgcgtccggatccttgctgggcaacgatgccagacgttgctgccatgacaccagcgagccatggaacgaagccattccgcgggcgttgatggtgcgtccccaacgagtgacgccgttgatgaacgccgcatccaatgacgtgcaggccgcggccgtcacgttttcgtgattgccagggccgctgtcagcgatcagctgtagcgcgcttgccgcggagccggtgcctttgaccagcgcgtacatcatcgcgtcggcgctgtccaggcagaaggtgagcaccgcgcgggccagggtctcgtcgtcgatcgtcaccatcatgccagcctcgttctcatggatattccctgcatcatttcctcaggtcctggggaagtctttcccgccagatcggataatgtccacgcaagccgcatggcacggtcggcgccacgcaggctcagccgctcgctcgccaaggcgcggttgaccaattcgatggccttgggggaggtgttggctctcagccaggtgccggtagcctgcgcgttgcagcaccagccgaattcgcggaaccgttcctgcgccatctgccgggcaacgatgacacgcagacgtatggcatggctcgaatcgccggagggagcgttccccggacttatccgctccaccggaggcacctcgatctggatgtcgatacggtcgaggatcggtccggaaagccggctgaaatacttgacgcggtccttttctcggcaggtgcagcgctcgccgttgccgtacgcgtagccgcacgggcagggattcgccgccataatcagttggaagcgagccggatagtatgtggtgcctttcgctctggaaatcgcgacatatccggattccaaaggttcgcgcagcgtctgcagcgtacgcgccgagaattccggagcctcgtccaagaacaggatgccgcgatgcgcgcgggtgatggctccgggctgggccaatcctgcgcctccacccaccagcgcggcggtcgacgcggtatggtggggcgcctcgaacggtggaacgtcgctgattccgtatccgggaagcgtgccgcataacgaacgaatcgaggccacttcaagctgttccgtctcgttcaaaggactcatgatgccgggaatgcgcgaagcgagcatggtcttgcctgtgccgggcggaccggtcatcatcagatgatggcctccggcggcagccacctccaacgcccatttggccgcttgctggcccatcacttcgctcatgtcgccgggcggagggcacatgcccgtggcgccgacatcggcgttcacggcatgcgtggcttcgggaatccggtagtccgcatcgcctcccatcagttcgatgagctctccgacatgcctcacgccgatcgccttgacatccggaacgagacgggcctcatcaaggttggcgtaaggcacgatgattgttgcgattccctgctcccgcgcatgcagcatgatgggcagcagtccgttgatgggcaatacggtgccgtcaagattcacctcgccaagcacgatggtgccggccagacagtcatgggcgattgcgccggccgcgctgagcacgctggccgcgatggccagatcatgcgaagagcctttcttcggcatggacgctggggagagattgaccgtgacacgggtttccggccatttgaaaccacttgcctggcatgccgacttgacccgttcgcgcgcctcggacaatgaggtgtcgggcaggccgatgatggagaaatagggaagtccaggggatacgaacgcttgaatctggacgatgaaggctttcaaaccgatcagtcctacggaaagggcgctgccgatggccatcagaacgctccctcgatatgatgcagcaaaggtctgtctccctgcaccacgacggtgacgacgtcaaaacgcacgccactgttcggcatgcggtgctccggcgccgtcagccattgcacggcggcatggcgcagattgatttgcttggaagcggtcaccgcctcctgaggggtgccgtagcgcatcgtacgtctggttttgacctcgacgaaaacgatctggcccatcggattgcgcgacacgacgtcgagttcgccgtatcggcaatgccagttgcggtcgagcgtccgccacccttggctttccaaccatgcggcggcgtactgttctcccagctcgccgatctgtcgggaacgcagcgtgccgtcatgcagacgccgcgctagggaatcgagaatctgctccggcggctgcgttggggccggaacatcatgtgatgatgaatggttcatggccctagtccaacagacagaagccacgcatgacaaggccgataggctaatgtggataacttacgtatctcgggcgtgtcgtggatagtcggtggatgagtcgacgctatccacacctatccacaacacgatccaaggcctctgtgcgaaaagagtgaccgatgaaccgtcaacgacgggtcaaagcggtcaattcgtcgagattgagttcgaagctcacgcctcgttcctcatgattcggctgatactgggtgctttccatcgcatggcggacgaactcgccggcgatgttcgcggcctcggccagaggacggccagccatcaccgcgccgcacagcgccgacgcgaacgcgtcgccggtgccgtgggtcatgaacggcagcttggcatgcgccagctcctgttttccggcgacgcccgtcgaagctgacgccacatagttgcgaatcatgccatcccctcgatcgatgcccttaagcaccacgttcttcgcgccggcggcaagcaacgccccaagaatctcatccacctgcgcgtcgtcgatatcctggcctggatagtcacggcccgtcaaaatggatgcctcggtaagattcggcatcagcgcatccgcgccatccaccagcgtgcccatcgcccgacatagctcaggagtgtacgtggcgtagatttctccgccgtcgcccatcaccggatccaccaaccgcaaggcatgcggatactccgcgtataggcgtttgatgattgcgacctggtccgcggaaccaagaaaaccggaatagacgccatccaaatcgacgttctcctgacgccatgcgtccagatagccgtccagaatctcggtcgtatcgtggaacgtgaatacctcgtagcgcgtgtgcgcggaaaacagcgccgtcggcaccggacaaacgtcgcagccggccgccgacagaatcggaatggccgccgtcagcgaacacttgccataaccgcacatgtcatgcaccgcggcgacgcgcggaatataccgcggatcacggtcgtacagaatctcatcgctcatatcggaacctctcttgcgatttgcctgcccatgactttagccgttcccctgacctgacgcgcatccgttcctcacggtgggtcaccggcatgtgggacttcggcgtgtcgaatggttccgaatggttttttcaacggttgggggagtggggaaagccgatgattccaacggtttataaggggatataggcaagtgcgataacgttcggcttgcgttgcgctcgccggccggtttattgtcgctaccaacacctggccaagcgccctacacggcagggcgggtggccaaccaagacgagaacaacgaacccttatccaaggagagcgcatcatggcaaacaagaactatcgtttcgaaaccctgcagctgcacgtcggccaggagcaggccgacccggccaccgactcccgcgcggtgccgatctaccagaccaccagctacgtcttccacaacttcgaccacgccgaggcccgcttcggactggcggacccgggcaacatctacggccgtctgaccaactccacccagggcgtgttcgaagaccgcatcgcggccctcgaaggcggcaccgcgggcctggccgtcgcgtccggcgcggccgccgtggaatacgcggtgcgcaacatcacccagtccggcgaccacatcgtcgcagccaagaacgtgtacggcggcaccttcaacctgctgcgccacaccctgccgcgcgacggcatcaccaccaccttcgtctccgccgagaacccgcaggagttcgaggacgccatccaggagaacaccaagctcgtctacttcgagaccttcggcaacccgaacgccgaccttccggacttcgaagccatcaccgccatcgcccacaagcaccacctgccggtgatcgtggacaacaccttcgcctccccgtacctgttccgcccgctggagcacggcgccgacgtcgttgtggaatccgccaccaagttcatcggcggccacggcaccaccctcggcggcgtgatcgtggaaggcggcaagttcaactgggccgaagtgccgggcaagttcccgaccctgaccgagccggatccgtcctaccatggcctgaacttctatgaggccctcggcggcgccgccttcgtgacccgtgtgcgcgccatcctgctgcgcgacaccggcgccaccctgtccccgttcgcggccttcctgctgctgcagggcaccgaaaccctgtccctgcgcgtcgaacgccacgtccagaacgcgctgaaggtcatcgactacctgaagaccgtgccggaggtcgagtccatctcccacccgtccatcgaaggccgcaaggacaacgacctgtacaagaagtacttcccgaacggcggcggttccatcttcaccttcgacatcaagggcggcaaggacgcggcacgcgtgttcatcgacaacctgcacctgttcagcctgctggccaatgtggccgacgccaagagcctcgtgatccacccggcctccaccacgcactcccaggagacgctggaggagctcgaggaccagggcatccaccagggcaccatccgcctgtccatcggactggagaacatcgacgacatcatcgaggacctcgaaagcggcttcaaggccttgcgcgaatccggtctggccaagtgactttggtctgaaacaactgtcgggcggtccgctgcaccatgagaagggggtgttgcgggccgcccgctttgcactgcgcttgtaacgcggatgggataaaattttcgcttgttgcgatatggtatgtcgcaatttgatacatcgaaagaaattccttgcgatttctttacaaatcgtaggaaaagcaagatgattttgctattttggtaaaaaagagagaagaagactgtattatggcgcaggacgtcaagaacgatatcaagaaagctattcaggtcaacaccatcccgttgatcgccatcatgaccgcggtcaccaccgtgctgaccatgttcgtgaagattccgaccccgacccgtggatacctcaacctgtccgacacgatgattttcttcagctcctatgcgttcggcccgtgggtcggcggcatcatcggcggtcttggaccggcgttgtccgacctcatctcgggatacccgcagtgggcaatcttcaccttcatcatcgacggtctgcaggcggtgctcgtgggtctgctggtccgtgaattcaaaccggccaacgtcgtcatcggctctctggtggccggcgtgtggaaggtgttcggctacttcatcgccggcggcatcctgtccggcttcggtccggccctaggcgaaatcatcggcaactcattccagatggttgtcggcctgatcgttggcttcgcactgttctccgcggtgcgcaaggcttatccgccgctggtgcgactcggcaacctcagcgtcaaggccggcgagtgatacattattgtcttgcataaataaagcccgtgggttcaccgatgaacggcgattccacgggctttatttatacatattcgttcatatagtatccgtagtggctgtgttcgcggccggtgcaatgggctgatgtgctgaaagatatggagaagagcgcatgatcacggtacgtgatttgagttggcagtatgagccattggtggatggcggcaagccggtggatagcctcaagcatgtcagcttcgatatcaaatcaggctcgttcgtgggcgtcatcggaccgaccggcgccggcaaatccaccctgtgcatggctttggccggaatcatcccgaatctggcggacggcaccatgaccggactggtggaagtcaacggcatgaacaccagccgtcattccgtatcggcgttgtccgaacgtatcggctacgtgcagcaggatcccgaagcgcagctgttctgtgcgagcgttgaggatgagatcgcctttcctttggaaaaccgcggcatcgcaccggacatcatcgacaagcagatcgacgtcatgctcgatctggtcggcatgaccggctaccgcaagcgcgtgccgaccagcctgtcgggtgggcagatgcagcgtgtggccatcgcggcggcattggcggcggaacccgacgtgctcatccttgacgaaccgactgcggcgctcgatccggaaggcaagcaggaagtcttcgatgtgcttgaacgcatccggcagacccgttccatgacggtgatcatggcggaacaggacacggagcatatcgcctattgggccgaccaagtgttgttcatggtcaatggggaattggtgcgcaacggcgacgctagcctgttcgtccgtgaaaaaggactgctggaatcctccggcgtgcaggtcgcggacgatccgctgccgcaggtcaaggccgtacagcagggcaaaaagcataagaaggacaaaaagaatcagccggaacggtccaaggacgtggtcatcagtctggaccatgtctcctaccaatatgagcgcggcggcaacgcatcgaaagctctggacgacgtgacgttcgacatcgaacgtggctcattcatcggactcatcggacgtaacggctccggtaagaccacactcgccaaacatctgaacggactgatccgacccacgcagggcacggtgacggtggatgggctcgacgcctccaaacacagcgtcggcgaaatggcggcccacgtcggattcgtcttccagaatcccgaccatcagatcttctgctccaccaccaaggaggaaatcgcattcggtcctaccgcgcttggactggacggagccaccgtgttcaaacgcgtcgacgagatgctgacgctgttcgacctgcaccgttatgaagacgtctcgccggccacgctcggctacggcgaacgccgtgcggtggcgctgtcatccgtgcttgcaatgcgcacgccgatcctcgtgctcgacgagcctacggccggtctcgaccaccgtctcgcagcacgcttcctcggcaccatcgagaaacttaaccagcgcggcgtcaccatcgtcatgatcagccacgacatgcgcgcggtataccggtactgcacgcacgtgctggaattggaggacggaaaagtcgtgcagtatgggccgatcgacaggtccgaagcggcgcagaagcaatctcggaccatccgcaaaccgcgtaaatccaatgggcccgtttcggcgacgcatgtgctgctgaaagtcaccaagcatgaggaaggacgacactgatggacgccgatttgtatgtaccgggcgacggctggctgcatcgcgccgacccccgtgtgaaattcctcatcaccgtggtcatgttggtgttgtgcctggtatggcgcaactgggcgttcatacttgacgttctgatcatcgaacatctcatgctcatcaccgacggcgtgccgctgaaacgcatcggctgggtgtggaagatcctcgccgtgatcatcgtgttcatcgtggtgctctggccgattttcgacccatccggcacgcacgtgctgtggcagtggggatggctgaaactcacgcgagagaacctcgtcatggccgcggtgatgggattgcgcattccggcgctcggattcgcgtgcttcctcacgttgttcaccaccagccagaccaagctgatccgagggctcacctccctgggcatgccgtacaaggccggactcacgctcgccaccgcgctgcgctacattccggtgttcttctccatcttccaatccgtatcggccgcgcaacgggcccgcggactcgacttgaacggcaagaaagacgccaccggcaagaaacgcaacgtattcgtacgcttggtggaccggttcaaatcgtatctgcccatcatcatcgcggtgctgatccgcgcctacaaaatgagccaaagcgtcggctgggctatggaatcgcgcgggctcaacctccaaggcgtgagacgcacctaccgcatacagctgaagatgagactctccgattggatcatccttgcggtcactgccgccgcgacgacaggcagcatctggctgatgctgtggcagttctgaggtaggccaatgttccagaacgaacaacgcatcaccatcaccgcacgcgacctgaaagtggtctcggccctgcaatgcgacggccgcatgaccatgcaggcgcttgccgacaaaatcggcatttccgtctacgcggctacggaaagctaccgcaggcttactgaatccggcatcatgagcatcgtcccggtgtgcaatccattgagtctgggcaattacagccaggtgctggtgggacttcgtctcgacgggagcagggatgaggcccttgccatgctccaatccatgccacaggtcacctacgtggtctgcgctctgggggatgccgacatcatcgctgaggctgtggtgtattcggctgaaggcatggatcatttcctcaaacatggtctgcgcgcgttgccgggattgtcccgtctgcaggtgttctcatgcggacgactggtgcttgatgaccacaatgtcagcgtggtgaaccgtctgctcgccgcgcatggcgaaaccggcttcctgaccaaacgcgaggcgagtgtcggcaccgatattccctcgcatcgtctggatccacggttcgtgcacacattcaacgaactgcagaaggacggcagggccagctatgcgtcgttgggggagcgtctcggcgtgacccatacggcgattcgcggccgcatcaaaaaactcgaagattccggcgtgatgcgcattatggccacggtaagccccatgcgtttgggaggattccgacaggcattcctcggacttggagtgaaacctccatatcggcttgactccgaacagcttctggccatcgacgaagtgacgtacgcgatgagtggtgtcggattgaacggtgccgattacctgattgaaatcatcgccgacaacgatgaggacctatggcgcgtggtggacgaatccattcgcccattgccaggcgtggaacagacctggtgggcgtccaccgtcagtgtggaaaaggagtcgtattggcttgagccgccgcacgaaggcgtattgctaggcgattgacgattgcccgatgcttggaacatggtttctgatcatccagttttcgctgttcccgcgttgatctcatactcaaggatgagtcgcggttcagcaggatttcagaccaacgcatgatgccgttgacgtcgaatgttccgtatgttggaagtaacttcgcaaagaaaggaacttccatggacatcagggacgccatcaaagccaataacactgccattgaagccatcgatcttgtcaaggactacggttccggaagcaacgcggtgcatgcgttacgtgacgtcaatatcgccttcgaacaaggaaaattcaccgtcatcatgggcccttccggctctggcaaatccacgttgatgcacacgctggccggacttgattcggccactagcggacacgtcatgttcgacggcaaggatctgacccgcatgaacgacgaccagctcaccctgctgcgccgccatcagatcggtttcatcttccaaagcttcaatctgctgccgatgtttactgccgaacagaacattctcatgcccttgaccttggctggagcgaaacccgaccgacagtggttgcgtctgctggtggaaacgcttggccttaaggaacgtcttaaccatcgtccgaacgaactatcgggaggccaacagcagcgtgtggccatcgcgcgagcattgatcaccaaaccgaaactggtgttcgcagacgagcccaccggcaatcttgactctgtatcaagcgccgaagtgttgagcttcctgaaacgttccgtcaacgaacttggccaaaccatcatcatggtcacgcatgatgcggtcgccgcgtcttacgccgaccgtgcgctcgtgttcgccgacggccagatcgtggcggacgtgaacaagccgacagcagaccagatgagtgaactgctgatgaaggaacgcgaagccgccacaatgaatgtggcttccgtgagacattcccgctaaacgcactgtagaagcattcgaagaaggaaacagaattaaccatgtggtccatcactttgaaactcatgcgaaaaaccaagcgcatgctcatacccgcaggcatcgccatcatgatcggcacggcgttcatcgccagcaccttcctgttcggcaatgccatgaacgactccctgacacggcagatgaccgccatgttcggaaacgccaactatgcggtgaccgtcaacagctccgacctgagcgatgaggaactcaacgaagcgtactccagcactgtcggcgacttccatctcgaccagatcgccggcatcgaaggggttgacggtgtccgcgcctcggtggaaaccggcgtcagcgtttccaggggggacagcgccatcagcggcgagatcatctctaccgcggcacagaagaacatgcttcccgtgaatattacggaaggggaccagccgaaggactccaacgaagtcgcactgccggaagacatggcgaaacagctgaacgtcggcattggcgacactgtaagactgacctcccaatatgcggtaggcaccgatggcaaagccaaagtggacaacgtgcgcgtggtcggactcacctccgatccgaacggcgcctactcgtactatggtggtgcgatcgtaggatccgacaatctgcttgccgcaatgcagggaacggacgatttcgacaccaccggaacaacaacggtatacctcgaccttgccttggatggaaatagcgtatccgcaaaaaccatcaacagtgtgaaagcgttgctgccaaagcatttcgatctgatgtcgcgacagcaggtcagtgacgaaagcatcaaatccttaaccggcaaccaaaccagcatcgtcaccacattcctcatgtgcttcggcgtgcttgccatgttcgtggcggcactggtgatcgccaacacgttccaagtactcgtggcgcaacgccgccgcacactcgccttgctgcgcaccatcggcgcgaaaaaaggccagctgtatggttccgtgctgttcgaagcggcagtgcttggcttcgtcgcatccgtgcttggcgtgatgctgggaagtctgctcatgtggggcatgtgcgtcagcaacatcatgcaagagggtatgcgattcaatttctcttggcaggccgccgtcatacctattctcttcggtattgtggtgacggtgctcgcatccctgggatccgcacgttccgctactgcggtgacgccattggaggcattgcgcccgattgaactgaccgacaaccgtcgttccagcctcacgcgagccataatcggtattctgatggtggtggtcggtatcgccatggtggtattttccatctggcgggtacaggccaccaatggcggcgaggatgcgagcagcgatcaattcacgatgattctgctcgtagccatcgccggcgccgcactggtgttcctcggaatggtggtcaccgcggtgttttggatgccggccctcatgaagggcgttggagcgttggcctcgctgacaggcccttccgcaacggttgctcacgccaacattcagaagaatccgcgacgcatcgcagcaaccggtgccgctctgctcatcggcgtcaccctggtttccaccatcgcaaccggtgccgccagcgccaaagagactatgaatggtgcgctcgccacccgttatagcgtcgacatcgtggccatgggcgatgacatcagccagcaaatggtcaaggatgtagccgacatcaacggcgtgtccgacacgttgtatgcgccggcggtttccgtgaccttggagaaagcggatggaacccagcctacgtccgcattgctggtcggcgtgaagaatatcgatcaggtcaagcaggtcatgcgtgccaacttgggtaacgcctccatcgacagtgatggcgtgctcatgccaacatacaatgcgcaaaccggcaaggaactgcagttcgccaatggtacggctgatttctctaccgaatggaaccaggacggcgacgctacgcgttcgctgacattgcaagcaaaccaagccgactaccgtcgcgtatccgcacagtatggagctgtcggattcgtggatgaaagccatttcaccaatggtgacctcgatgccgccacccatgtgctgctggtcaaggcggatactgacaagtcgggagtttccgttgacggcatctacaacgacatgcaggccgcattggagaagagcactgatgcgacagtgaccggaccgatcgccgaacgcatcgtatgggcgaagatgatcgactccatgatgatgcttctggtgggattgatcgctgtggctgtgctcatcgcacttgtcggcgtggcgaacacgctgtccctgtcggtgatcgaacgcacccgcgaatcggccaccctgcgcgccatcggcatgacccgcggccagctcagggcatcgctcgccatcgaagcgctgctcatctcgctcgtctccggcatcgccggcatcctgctcggcacattgttcggctggctgggcgcatacgtggtgttcagcctgtacggcaccgtggtgttccccttcgaatggggcgtcaacggcatcgtgctcgccgtggccgccgtggctgcgttgctcgccagcatcgcacctgcccgcagagcggtcaaagtaccgcctgttgaggcgctcgcagaagcttaggcgataaacggaatgctccttcgaaagaaggagcatttttgttgccgaatacgttttatgaagattttatacgagatggttttcgtaggcgaacacgacggcttggacgcggtcgcgcgcattgattttcgacaggatatgcgcgacatgcgttttcacggtaggcaggctgatgaacagcttgtccgcgatctcctgattcgacaggccatgcgcgatttcgatgagcacctcgcgctcgcggtcggtcagttcgtccaattccggatcggtgtacatagttgccgtcgaagcggaagcggacgttgcggaaacgggcgctgcggcggccgttcctgcgaaatcgccatccatcatcttctctataagccgtttcgtggcggatggcgcgatgatcgcgttgccttggtacacggtgcgaatcgaattgagcagcgtctccggttccgtgtccttcagcaggaagccggacgcgccggcgttgatcgcggccatcacgtattcgtccaaatcgaatgtcgtcagaatgatcacacgggtatgcgcatcgtcaagcgcgctgccatcgggtgcgaaacgatgctgcaacgcgctgatccgacgtgtcgcctcaatgccgtccataccgggcatacgcacgtccatcagcaccacgtcgggatgcagcgtctccgccaaagccaccgcttccgcgccatcgcgcgcctggccgacaaccgccatatccggttgcgagccgatcaccatcgcgaaaccggcacgtaccaattcctgatcatcggcgatgaccacacgaatcttctgttcttcactcatactctccaccttatcggcatcgttccgctcacagcgcgaaacaaccccttaaatctccctgaaaaacttgaaccggctatcgagacgcgcgctgcagctgctcctccagcggtgctgcgggcctcaactgcagttcgctcgcgctaccggcatgagcgtcatcgctgaaaccagtctcacgaagcactccgagcagttcgcgcatacgcttaagcgcggcgcgcccctgttctccgatggctttgaacgctgcggaaatctcgtcggcagtaggctctttgccttgtgcttcggcagcgtccaacatgcggataccatcgacggcttgactaatcacgctgttcagcgtggcggtgacttcagcctgaatgctggcactgatacggtcgcgttccatattcgccgcgagaatacgctgcttctcctgctcggccaccagcgcttcctctcgcgcctgcaacaccagtgcgtttgaatcactggagcgagtccaacgcgcccatgccataatgccggcgcacagtatcaacaccgcaaccgtatacataacgccggtaaaaaacgccgcagtactgcttgacgcggctgaaaccggttttgtcaagcccacggaagcggtgatggcgccgaacaaggtaatgtatccgtgttgatcggccgcgattttcaagcccatcagcaccgaacaggtgacagcggcaggaccggtccaacgccatgcgtgttcgcgtccatacaatacggctgaatacagagcacacagcgacgctacgatatgtccaacctcaatcgatcccaaaaacaacaattgcacaactgacaatacgaacacaataagcgcgcaagtctcggggaacctgcgtcgaagggacagcgccaatatgcagcaggtagcgatcgcatgagagagctgcgcaagaggtgaactatcaaaaaggaacgtaatcgacatgcgattcagcagcatgaccaataccacggcaccaacggaatccatgagcacataatggtgctgcgtccatgcggaaacacgttccacccaattcggccctcgcgaattggatgtatttgcaaattctacggatttcagtttcaacgatttgagcaaatcatgcagattgggtgcggtgatgcgcaaatgttgcagggcattcgaacgatgatcgcgaccggtcggttggttggtttcctgcgtccgctccgatggttgatctgggattcgcgccgatatgttaacggctgtgtgagacgcgattgcttcgtcggataatctcgctttgctggatatggcagttgtgttgcacgattcggactgttccgaggcatactgttcgccggtttcgtctgtcacctgttctttaccgccgtaaggcagggtggccatgacttcgaagcctccgccgagttgagggccagcctgcaacgagcctccggccgattcgatgcgttccttcatgcccagcaggccgtaacctggcgcatgcccgtcgatattggccgccgcgccacgaccattgtcggtgatggtcaaagtgagcaaaccgttgttccatgactctttaatatgcgcatcgacgtgcggccccgcatacttgcggatattcgtcagcgcctcctgcactacatggtaggaagctatcgaggcttgttcgctgagttgttctgggctggcggtgccggtgatattccgtcggattcgaatgtcgggggagacgttttgcgcttgttccacaagattgccgatatcgttataatcggcgtgcggtgaacccccgaatactcccagaagacgttgcatgtcatgcagtgcgcgttccgattcgtgtcgaatcgtctccatggtgtttctggcaaccgcgggatcatgcgtgcctgcatagcgaccgccgtcagactgcacgatgatgattgacagggtgtgcgccaccacatcgtgcatgtcacgtgcgatgcgtgcgcgttccgccaacgcggcgatatcgcgttcatcctggtctcgcgcggcgattgcctcattgcgttcccgcatcatgcgaacggttgccagacgggcgcgctgccagaacgctacaatgacggtggaaataatgcatacttcgaaaatcggcgtcagcaccagcatggattgcgccatcatgtcggcgacttccgacatggatgttcctgtgtagatggaaccgagagtgtcttccgtggccataacgccattcggatttgagccattccagctgctccatgtatgcactttgcctccggtgagcagcggtccattggacatggtccatgccgccagcgccgaagccagaagaccgatggacaacgccagaataatgaaggctttcgtgtttttgggattgccgtagacgatcaccgaatacagcatgaacaatgccagaatatcggcgcccaacaggcaagggccgaatatgagatgcgccaaggtcaatgccacgcagagcaacgctccggtctgcggccgccatcgacggatcagcagcgggataagcattgccgcttcccatgccatctgcgtggaaggcttaaggtcaaacagcaatcccggattataggtgatgccgccggtcacgccgaacagcagaacacctatgacaagcgtgatgatgagatcgcctgcgaagacatgaccatgcatccacgacaagagacgctgcttgagattcgacatacgttccaccctagcgccagatatgctgtgacgccatcatgcgcgggaatgaaatagcggcaggataaagccgcttttgtgaggtaaggttgtctccgcatgtgggtgggatggaagccatcaagaagtcactacccgcattgaacatgccgatgacgccaaagggaaggtgaatgcatgacgttgctgagcgaatactacgtgcccggattgcatattgaggatcgttccatcaaggtgccgttggattggacgggccacgagcccggtcatgggttcgatggcgaatcaatcagcctgttctaccgtgtggtcaccgctcccgaacatgtgcatgatgatcttccgctgctcatgttcctgcagggtggtcccggtggttccggcccccgtccgctcggtccaagttccgatggttggattgaggaggccatcaagcatttccgtgtggtgttgccggatcaacgtggtactgggcgttcgtctcgtgtcgatacgcatgtgattgagggtatggatggcggcggcaaggccggtgccgcgtttttgaagcgcttcctcgccgattcgatcgttcgtgatttcgagcatctgcgtcgtaccgaattcgggggcgcacgttgggccacgcttggtcaaagctatggcggattcctgacgctgacgtatctttcgctgttcccgcaaggggttatcgccagtttcaccacgggcggcattcctcatgttcccgccgatgcgaccgacgtgtaccgtcatacgttcccgcgcatggcggcaaagacgaagcagttctacgagcgttacccgatcgatgtcgaacgtgccgcggccgtcgccgacattctgcagtcgcgcaaggtcgcattgccgaacggcgatccgctcacggtggaacgcttccaatgcttgggatccgatttcggcatgaagccaagtttcgaacgcgtgcattggattcttgaccaggcattcctcgacggcgacggttcggcctcgacctcggcggaactgtctgacgaattcctgtcttccgtgatggatgcgacctcgtctcgcccgctgtactggccgttgcaggagttcatctacgccaacggcgagctggaaacgccgatttgctgggccgcccagcgcgtgcgcggcgagcatccggaattcgcgggtgacatccgtccgcttaatttcaccggcgaggccatgttcccgtggatgttcgagcaggaacgtgcgttgcgtccgttcaaaccagccatggacgtgcttatggaagacacgcatttcggcacgatctacgatgccgaccagttggcgcgcaatgaggttccgctgcaggctgtcgtctatttcgacgacatgtacgtagattctggattgcagctcgacacgctgtcccgcgtcggtcgttcacattattggaccaccaacgaattcgagcatgacggcgtgcatggttccgtggtcttcaaacgcctgttcaacgaagcactgaacaggggagatctggaagaactgttctgacgcagacaatccatccatatatcgatatcaaataggaaccgggaacaacaaggagaaaccatgtccaacccaaccatcggattcatcggatacggcaacatggcacaggccattgccgaaggacttgtcgcggcaggtgcaatcgacggtactgacatcgtggcgtgcgccgcgcattacgacaaactggagaaaaccacggcgaaggttggtgccacaccgctgcgcaccgctgccgaagtcgcagacgcggccgacgttgtcatcatcgccatcaaaccgtaccagattgaaagcgtcatcaaaccaatcgccggcgcgctcgctaacgaaagcacattcgtcgtatccattgcggcaggctgggatctcgccagataccgtgaactgttcggcgccgatttcggcgcgatgcacatccagtgcaccattccgaacacgccgatggccgtcggcaaaggcgtgctcgtcacggaaaccgacaacacgctgaccgacgcgcaaaacgagacgttcgaaaagctgttctcatcgatcagcctcatcgaacgcgtcgactccgcgcatatgggcatcggcatgtgcatcgccggctgcgcgcccgcattcaccgacatgtacatcgaggcgctcggcgacgcgggcgtgaaatacggtctgcaacgcgccaccgcctaccgtctggccgcaaagatggtggaaggcgtcggcgcactgtacctggccaacgaaacccatccgggtgccatgaaggacgccgtctgctctccaggaggcaccaccatcaagggtgtcgcatcgttggaggaaagcgcgttccgtggtgccgtgatcaaagcggtcgacgccatcgaagcctaatactaaactaaggaaccatgtctcttactatcggaatcgtcggactgccgaacgtcggcaagtccaccatgttcaacgcattgacccgtaacaacgtgctggcggaaaactatccgttcgccaccatcgagccgaacaccggcatcgtgccgctgccggacaaccgtctgccggtgctcgccaagctcgtgcacaccgagaagatcgtgccggcaaccgtcaccttcgtcgacatcgcaggcatcgtcaagggcgcctccgaaggcgaaggcctgggcaacaagttcctcgccaacatccgcgaggccgacgcgatctgcgaggtcgtacgcgccttcgaagacgacgacatcgtccacgtcaacggcaaggtcgatccggccgacgacatcgacaccatcaacaccgagctcatcctcgccgacctgcagaccatcgagaacgcgctgccgaagctggagaaggatctgcgcggcaagaagatcgagccggcctacatggacgccgtcaagcaggccaaggagatcctcgaagccggtgagaccatcgacaaggccgcccgcgaaggccgcttcgacaaggactccgtctacgacctgcacctgatgagcgccaagccgttcatctacgtgttcaacgtggacgattccgaactgcagaaccaggatctcaagaccaagctcgccgcctccgtggctccggctccggccatcttcctcaacgcgcaattcgaagccgacctgaccgaactcgacgaggacgacgcgcgcgaaatgctcgccgacgccggccttgaggaatccggcctcgaccagctggcacgcgtcggctacgacacgctcggtctgtccaccttcctcaccgcaggcgagaaggaagtgcgcgcatggcagatccacaagggctacaccgccccgcaggccgccggcgtgatccacaccgacttcgaaaagggcttcatcaaggccgatatcgtctcctatgacgatttcgttgccgccgaaggctccatgacgaagatcaaggaggaaggcaagctccgtcaggagggtcgcgactacgtcatggccgacggagatattgtggagttcaagttcaacatctcgaagtaagtgtttctctggctcccctctttgaggggagctgtcgctacaagcgactgatgagcggcacggataaggcctgagaagtcgtcttctcaggcctttgtcatgacattgttctgcaaggactggctgctgcagcagcataatgtgtgttttattattcggccttggcggcttgctggtcaatccaattgttgacgtcggtgaccgcctcgtcaagggttgctttggcggctttgtagtatttggaatctacaggttgacgatttccgctccgaacggccagagcgcaagcttggccattttgaacgactggatgccgaacggaatgccgatgatggtgatgcagttgagcacgcctgcacccagatagccgagtgccatccaccagccgaccatcaccacccacaggatgttggccaaggcagagccgactccgccgccgtattgcacggttttgccaaacggcgtcagggtgagtcccgccatcttgaacgcttgaatgccgaacgggatgccgatgatggagatgcacagaatcagtcccaccaatgcccatccgattgcgatggccaatccaccaagaatgatccacaggatattgccgagaactcgcatgattagtccctttccgattccggccgattccgcgcatgttcagcttcactattttgccagaaatcatgacggaaacacgagacgcaacccttagctcgcccctgattcatacccggaccgttattcatgcggagcgtatgcgtaagcccaatcctcttgtgaagattttgtgtattgtcaggcatgcgtgggtttcaccgtcgatctgaatgatgataggcttctcgatgcctgccgtacgaagacccatcaaggagatgccatgaacctgtatcgctacgcgatgttcatcgcacgcgcctgtcgtgggtcgttcgtcggcaatgttctgtttgccaatccacaaatggccctattctcgatgctggtgtagcggggacacgccttatgccgggatgtaccgatggcccatccgcaatcgacgtcgcatgaatcgctcaccatagccatcaacttacgcaaagccgcgaatcgtttgccgtatatgaatgcggaacggatggcggcttttcctttaccccggactcatcggtgtccccgcgtcttgacacaagtatggggccggatcgcccacacatgccgttaccaacagaaggaaatgctgtgacctcacagaaaaccgcggaattcgggtccgccgccagttccgtaaagcctattgattcgcacgcccgattcatcgtcgtgggcgtgatcgtcgtcggctcgttcatcgcgctgctcaaccagaccgtcatgtcaccggccttgccggcactgatgcgtgatttcaatatcaccaccggcaccgtgcagtgggtgaccagcgtctacatgctggtctcgggcatcatggtgccgatttcaggctatctgattgataaattctccacccgaaagctcttcgccggagcccttgccactttcatggtcggcacactgctgtgtgccgtcgcgccgaatttcgtgctgttgctcgtcggacgcatactgcaatccgccggctccggcgtgctgttgccattggtcgccgtagtgccgatgctcgtctatccgccggataagcgcggcaccgccatgggcatggccggtatcgtcatggccgccggcccggctatcggcccggttgtcggtggtctggtgattgacggtttcggatggcgcccgatgttcattggcatcgcagtcgtggcactggtcatccttgtcggaggcacgatgatgctcaagaacgtcagcgagttgaagaacccaaagctcaacgtcctgtccgtgatcctttcgaccatcgcgttcggtggcctgctctatggcttctcgtccgcttccacgatgggatgggccagtccggtcgtcattacctcaatcgtcgttggtcttgtggccttcgtcgcattcgtatacaagcaagtcaagctcgatgagccattgttgcgcgttgacacccttgccacccgcaacttccgcaactccgcgattctggtcactctgatcaacgccgcagtcgccgcaaccaacgtgacgttgcctatcttcatccagaatgtgctcggccaatccgccaccgtcaccggcatggtcatgctgcccgccgcggcggtcggcatcatcctgagtccggtcgccggtgccgcattcgacaaattcggcccgcgcggcgtgggcatcggcggccttgcgctcatgaccatctctcttggtcttctcggcaccatcaacaccaggacatcagtgctgtttgtcgccgtgttctgcgcattgcaggcatccggtcaggctatcgccaacatgccgatcaacacttggggcgtcaacgctttgccgaacgacatgatcgcccatggcaacgccatcgccaacaccggccgccagatcgcggcagccattgcgacctcgcttctggttaccgcagaaacatccgtgaccgcctcgcacatgtcccagggtgtgaagtccgccacggccagcggcatcgcgttctcctacctgctgtgcgccgccatctcgctggtcgccctgatcatctgcatcttcaccgtcaccagtcgtgccaaggagaaggccgcacgcaacgccaaggcctacgaggcgcaagcctccgccgaagtcgcggccgaaaccactgaaggccagcccgccgagcatcactacgccggcgcatacgtggcccctgcctcctccctgttcaagcagacccaggaacagtccatcagtgggatcatggacgatcatccctacagctgcctggacagcgatgacatcacgcatgtggtgcgcgagttcatccgcctcaacgtttccagccttcccgtggtgaacggcgatggcaggctcgtcggcttcgtcagcgacggcgatgtcatgaaatcgattgccacctatgaatcccgtacggtttccaccggcactggttcgacgatggtggtgttcgacgacgaaaccgtggcctccaaggtgcaggcgctctccggcaagaaggtgatggacatcgccacgcgtaaggtcgttgccgccacgcccgaccagcatgttggagaggtggcccgaatcctcgccaagaagcagttcaagaaactgccggtggtggatggtgatggcagactcgtcggtgtgatccgccgtaagtccgtgatggaacatgccttcgacgcgttgttcccaaaggatgatcggtgattcggcgtcatcatcgtccgcaacaacatgcgcgtggtcgccttcggcatcactctggtgggcgtctccgtcgttggtcttggcgtggtccacaagctgctggcgtatttgctgattgatgtggtgaacggtttggcttcggccatctgcatgggcccgatgcgcaccatcatccagaccgagaccgatgagaagatggctggccgtgtattcggccaggcacggcgcaacactagtgtcgatgcggcgcgtaacgcggcctgatggcgattaagccgaactaccaaatttgtgcgtacgactcgtaggacgtgtagtccggcaaatcgtacaccagtatcgagaaaggcatggattggccattgtccggccaatccacaaatgccatttctccatagatgatggtaccttgcttatcccgcaacactagggaaaccttgatctgctgtccatctgaaggcttgaaaccatcggtcacggcgcggacttcgccattgaaggtcgtgccgccgtcgttgttgcgcactttggagattccgctgatggggaaagtggcagtgccttgtgcttccgtgacgttgtactcattcggactgagcgcaacgaagtccacggtggccggtgcggtaccttgacccgcttgcccggcgttatatatagtctgattcgggaacgccatattcagcgtttgcgtctgcgagaacacgatggagccgtctttggttcgccggtgatggcgacttctggatactgtacctgcagggttgtgctggtgttgcgcagggcgaatgcgtagctaacgtacccctgttggcttacagaccaaccggattccaccagctccagcggattgtcggcaaccgcgtcggtgccgcttgtgccggtactgttattgccgccaatgtggcggcactgggcttgcgtttttcggcagtggcattgtcggcagcgttgccacagcctgtattgaccggggcattgtcggcaacggcctcgccgtcctgctcttggacgcgccgttcgcgaatgcgttgctcaatgggatcgtcgaccaaagtctggatgatgcgtgccagatcgcggtctcagactgcatcccacttaccgacgtccaacaattgggggtgcggttcagttccgtgaaaaacactcttgtgctttgcttcgtttcctgctatgtgtgaaaacatggataatacgcatgctcgccgcttcgatgacacggtgcggcgtcgggcgggggagcgcggcgccatcatgacgctgcgcgactgtccgcgcgccatgcgcgttgtcgtggacggcatcgacctggatgaccggcaccggttccgcctatgtgagataggattggctccgggcgcgggtttacgggtcatgcagcggagcgctttcggcggaagggtcgtcgcattcggaaacgaacgtgtcgcggtggacggcggcaccgcgcgtgccgtccgggtacggttcgcgtgggatgaacatgcgcaagacgacgttgcgtaacgcgaagagaacgggaatatgcgcgaatgttgaatctacggaacctgaggggcggcgactgctgccgttcgcagaatggctgttgccggcatcgcgcttgtcgtgtcaacagacccgcgaatgacggcatgggcggcgactccggcaatatgggaaacgtcgaaaatgtaaaacgcgtcgtgtttgtaggcaatccgaacgttggcaaatcttccatgttcaacgcgctgctcggcgcgagaacccgcacgatgaacgcgcccggcaccacggtgtccatcacctgcgggcaataccattacgaaaaaccgaaaacagcgggaaacgcgcaaaactggcagttcgtggacacccccggcacatattctctggcgccgatgagtcccgatgagcaggttgccgtcgacgcgctgatcggcatgtcaggcatgcccgttcccgaccttgccgtcgtggtgctggacgccaccgcgctgtcccgatcgctgtacctgctgtcgatggtggtggagctcgggctgcccaccgtcgtggcactcaccatgaacgacctcgccgtccgcaacggctgcggcgtcgatgcggaacgactgtcccatttgctggacggcatgccggtcgtcgcgattgacggacgtaccggagacggcggcaaggctttggccgacgcgatcgccgcaagtttcgagggaacgcccgttccgcacgggctgaccgcactgccaaccgcaacagccgacgccgacatgaaaaccgccgacggcctgagcgtctgggccgaatcgcgggccgacgcacgactcgactggaccgccggcatattgcgcggcctcgacatgcatgcggtcgaccacgtcaccttgtccgaccgcatcgaccgcgtgctgctgcaccccgtgattggcgtcctcgtcttccttgcggtgctgttcgtcgtgttccaggccaccaccacgctcgccagccccatgcaggattggattgacgtgaccttccgcggatggtgcgcagatggactcgacctgctgctcggcctgttcggaccatccgtgagcggcggctggctgcgttcgctgctggtggacggtctgcttgacggcgtggtcaccgtgctgacgttcattccggtgatgggcatcatgttcctgctgctgtcaatcttggaggattccggctacatggcccgcgccgcgttcgtgatggaccgtgccatgcgcgccttgggattggacggtcgcgcgttcctgccgatcatcgtcggcttcggctgcaatctgccggctttggccgccacacgaaccctatccgattcccggcaacgggtgcttaccggcatgctggtgccgttcgcggcatgttccgcgcgactatcggtgtttttggtgctcgcccacgcgttcttcccgaaatacgccggtctcgtggtcttcctcatgtacgtggcttcggtcatggtcatcctgctggtcggcgtgctgctgcgccacaccatgttccgcggcctcgaacccgaaccgttgatgctggcgcttcccgcataccaatgcccgcgcgcgttgcagctggcacgttcggtgctgctgcgtctatggggcttcatccgtggagccagcgtgatcatcatttcaatgatcacggcgctgtggctgctgcagggcattccggtaaccgccaacgcaggcggtttcgctcatgtcgacgacgtgcatgattccgcgtatggcgtgctcgccgacgcggtcgctcccgtgttcgcgccggccggtttcgatgactggcatgcctcggccgcgctgatcacgggattcgtggccaaagaggtcgtggtcggttcgatgtcacagtcataccatgcggacgaaccggatgatgcggcttcccaacaagccggggagggaacgctgggacagaagctgcgcgcctcgttcgaccagtcatcgcacggccacggcaaggcggcggccatcgccttcctgctgttcacgctcgcctacacgccatgtcttgcaacggtcgccgaaatgcgacggcagtttggcacgaaagtcgcggcgcgatccgtcctgctgagcttggccgtggcatacgtcatcgccatcatcgccttccaaacattgcggttgatatggtgagcggtatggaacggtccggcgcttccgcgcacggatggcggcgcacgccacgtacggctgatacatacggcgacggccggaacgatatcgtcgcacgcatcgccggcgacatcgccgcaggattgacggtgcggcaaatcgccgacaaacggcatctgccggtcgatttcgtggacatggctgtcgaacgagcggacaaacgggggctgctggccgtgatggacatgcggcacgcctgcggagagacgatatgccagcccgatcctgcgtcattggtgtgcgcaggatgcccattcaggatattcccatcttcaagcccgtacaataggcaaggttaacaagacgaagaacgatgacagctatcggttcgcaaggggtgacacgtatggattatcagtaccagaccactgaacagccttccagcccccgcaaggcatggccgatcgtcctcgccgtggtcgtggccctcatcgtggcatgcggtgccggcgtgtgcgtttaccgcaacaagcagcaggaagcattggccacatgccggcaatcgctcgcggaattcagctcggcccgcaaagccgtgctcgacacttccgaaaacggcagcgaactgcagaagctgattcgaggcgcgctcggcgtgaacgacatcatcgacgcgttcgcggacgcggccaccagcgccgagaacacagtcgatacggaaggctgcaaggcggaagccaccatcacgcagctcaatctcgtagccaaaacgttggacagcgccaccgattccctgaacgccagtttgaaaagcatccaagagaaaaacgccgaaaccgcgttgcaggatccgaaggccgattcggatggcgcggtagccggacaatcgtccaataacccatccgggcaatcgaacggagcctcttcgaacagcacttcttcgaacggcacctccgacacgaaatcgttggatgaatccaaaaaggaactgcaacagtcgatcgacaaggcagacaaactggtcgacaaactcagcaaggacgattccctgaccctgaccggacgcaaactgctgtccgcgctgtccaaggccgcggactccggacagaagctcgtcgaaagcggcaacatcaaggattccaagtattacaaggcggccaaggtcacgcttgacgaagccattgacatggctgacaactgggtgaacagccaggcggccaaagcgcagtagcatgctcccgcgtgttgcttccgcagccacgtctaaagtttccttcggaaagcatgacgtgaatacgacgtcggatgtgtggaagcgtgtaaggggggacggatggcagacgcggggcaggaatcatcggaaggcattagcgtatcgaagccggtcgcccgcgtgatgatgctggtcaacgcggcggtatggggatcaggttacaccatgctcaagcatgtgcaggagaacatgccgacacagtggatgatgttcttccgtatggcttcggcggtactgcttatggccatcgtgtttttcccacgtcttcgcaggattcgcctgcgccgttatatcgttcccggtctgatactcgcgttgacttactggctgggattcatcttccagctcaaaggacttgaaaccacgtctcccggacgcaacagcttcttcaccgacacctattgcgtgatggtgccgttcgtggtgtgggcgttcacgcgcaaacgccccagctggcagcatctggtggccgcgttcgtctgcgcgttcggcattggtctggtgtcgctgagcggcggcggtggcgcggaactcatgcatatgagcttcggtgacgccatgactatcatcggcgcgtttttcttcgcgttgaatctggttttggttggtttcatcggcaaggatttcgacgcgatcgcgctgatgcttgccgaattcgtgtggtgcgccctgctgttcggtgctggcgcggtgcttaccgaaggcggaccgtccatggcttgggcgcggtgggacatcgtgctgtgcatcgcctacctggtggtcggctccacggtgatcgcccaagtgtttcaaaccatcgccatacagaatctgcccacttccgaggcgtccgtgatcttaagcacggaatgcatcttcgccatgctggtatccgtgattttcaccggcgaaacgctgaccgtgccgtcgttatgcggtttcgcgctgattttcggtgcgattctgctgtccgaaatccaactgccctccgcaaaacgacagcgtggcacaacggaaggcgattagaagaacagcgccgcgattcccgccgcgaagcacatgagcagcacggacgtgaggaagctcgccaggaacgctttctgtcccttcttggcgatggcgctgaaattcacgttgatgccaagcgcggccatggccatgccgagcacgatgtatgcgaaatcgaccagattcggtgcgatggcaccgatgaacggcacgaacgtgccgatgatggaagcgccgatgaaaccgagcatgaaccacgggaacgacactttgcgtttgccgtcggccggcatttcggaatggtttttatcccaccaaacggcgatgatgatggccgcgaacaccagcatcagcacgcgggaaagcttcatgatggtggcgatgtccaccgcgccgaacgcgtcgccggcggccacggcatgggcgatttcgtgcagggacgctccggcggtgatgcccaactgcgtcttgctcaggcccgtcaacggcccaagggcgatttccagcaatgcgaagatggtgcccatgatggcgatgatggccacggccatcacctcattgttggccttctcatcctctttttccggcggcaccttgatggagccggacaatcccatgacggctgccgcgccacagatgccggtaccgcccgccacgagaatggcgagctgcggatcgacgccaagcttgcgtgcgatgttgtagcacaccacgatggtgagcgtcaccaccactgccgcgatcggcagacacttgataccctgcgtgaacagcaccgtcagattgagcttgaaaccaagcaggatgatgcccaggcgaagcagcttgttcgaaatgagcccggccgcatccttcacaccggccttatgttcggcggaacggctcgaataccatttgcggatcgggaactgcgcgaccatgccgatgagcagagcgatgatcaacgcgccgaacaggctgaatcccggaaactgcttgagccacgaagccaccagagaggccgccaacgtgacgatgccaatgaacgccatttccttggtggctatgcgagtccaccatttcttgcaaaaatcaatcacgagcgtcaagtgttccggttcatgcggacaagccggccggatggggagacacgcgcgggaatccatattttgcaacatatctcgaacgggtttgaggtctgtttgcttcaagtcgggtttaagttggtacgctggagatgcaagccaaaaacacaggcagaatcaaggagggtcaagatgcaattcgaagcctcgcgactggaaggactggaacaccgcaccgacgcgcagtccgcaccggaagtgttcttcacgccgatcatcacaccggaaagcctcgtcgccgcctaccatgcgctcggacgcaagccggaaggcaaaacggccatcaaagtccattccggcgaatcggaaaaatccaataatctcaatccttcgctcgtcaaggacctcgtgcaggagatcggcggcacgctcgtggaatgcgctaccgcatacgacggcaatcgtgaaacccccgaaaaaagccttgccacgttcaaaaagcacggatacgccgatcttgcgccaatccagatcatggacatgggcggcgaaatcgagatcccggtggccaagcaccgccacatcgcctacgacatcgtcggcaagcatatcgacgactacgattccattttcgtgctgtcgcatttcaaaggccatccgatgggaggcttcggcggcgcgctcaagaacgtgtccatcggcatagcctcgtcgaacggcaaacgctggatccattccgccggcgtcaccaaggacaagtgggtggaaactcctcaggatgcattcctcgaatcgatggccgaagccgatgaggccgtgatcagccacatgcatggcaagatgatgtatctgaacgtcatgaaccgcctgtcggtggattgcgactgcctgccctccccgacggaaccggacatgcatgacatcggcgtgctgtcctcgctcgacccggtggcactcgaccaggcatgcgtcgacctcatccacaccgcccccgacggagcgtccgtcaccgaacgcatcgcctcgctccacggcgaacacatcctcgaatacgccgaggaacttggcatcggttcgcgcgcgtaccgtctgaccgtactcgactgacggcgaacgcaatggtcacgaaacccgcgaagcctacggaagccagcatcgcaatcgcacgtatcgaaacgttgcttgccgaacgcgattgtgtgttcgtcgcaatcgacgggccatgcacgtctggcaaaaccacgtttgccgcgatgctcaacaggcgtttcggcggcaacgtgctgcacatggacgatttcttcctccgtcccgaacagcgcacgccggaacgtttcgccgaacccggcggcaacgtggaccgtgaacggttcgaaacggaagtgttggcaccgctcgccgccggacaagccgcgcaataccggccatgggattgccatacaggcgatttcgccgtcgcgtacgccgtcgaaccggcccagctgaccattgtggaaggcggctacagcatgcaccccgccttgcgggggtattacgattgcatgatctgtcttgcggtcgatcctgccgaacagttgcgtcggctcgaacgacgcaatccacgcatgttgcaacgattcgtcgacgagtggattccgctggaaaaccgctatttcgaagcgaccaatatccaagccgtcgccgatttgctggtcgacaccgcgctgccggacggtgggtcggtcgtcgagccggtatgacgtatacgcatatccgaagagaaggaaacattaaggagaaaacaaatgtctgattccgcaaccatgcccgcggccgccctgcgccgcaccgacctgccgaaactgagtctcggcaccaagacagcagccaccctgctcgccatcgtcgcagcggtcgtgctgccgcaactgttccacgtcatcggcgccgtctccggacagggcaccatgctgggcgtcgcgttcctgccgatgcatctgccgatcatcttcgtcggcctgatcgcgggccccgccgtcggcgcgatcgccggcgccgccgctccgctcgtgagcttcctgctgtccggcatgccgatgctggcgatgctgccgctcatgatggtcgaactgtgcgcatacggcctggtagccggtctgctgcgcggcatcaagctgccgagcctggcgaaggtggtcatcgcacagctcgccggacgtgtggtgctgaccgcagccaccgcgatcgccgtgttcgcgttcggttccagcaaggccatcgccgccacatggacgagcgacctggccgccggcctgcccggtctcgcgctgcagtgggcgctgattccgctcgccgcctactggaccgagtcgctgatcgccaagcgcaaccactgatatgacgtttgcccggccacgttctgggcaaacgcgtgatatgcgggagccgagccgttaagcttggctcccgttacttataggaggactacgtaggagttttacgaaggggaagcggtcatgatcgcaggagtgtccatcaccactttgctgctggtgcttgtcgccggaatcggcgcgggattcgtcggatacgcggtcggcgcgtcctcgctgatctcctatcctgcgttgctggcgttcggcatcccgccggtgctgtccaacaccacgaacacggtgggcgtgtgcggcaccggcatcggcgggctgctgtccgcgcgcaaggagctcaagggccagggacgccgtgtggctgtctacgcttgcatcggcttggtcggaggcatcatcggcggcttgctgctgttggaattgcccgcgaaggtcttcgaattcgctgtgccgccgctcattctgttcagcgcgttgatcatcgcgctgaacccgcggaagaaagcggccgcacgcgacgctgtcgcgcaggcgttgccccaatcgcagcaaggcgagcgcgcggcgctgatcgccagtaggacggccaatggcagtctgcgcaacgacccgtggtggctgtgggttggcgtgagcttcgtcggcatctattcgggatatttcggtgccgccgccggtaccctcgccctggcgatcctcgacctcggcaagatcggcccgttccaccagatcaacgcgctgaagaccgtggtcggcttcggcgcgaacatctccgccgcgatcatgttcatctgccgtggctccgtctactggccgttcgccatcgccatgtgcctgggctgcatcatcggcagttccatcgcccctccggtcacacgccatatccccgagaacatcatgcgcgccgccgccgtgctcaccggcatcgtcctcgccgtcaagcttggctgtagcacctatttctaaaagcctttggttccggagtgtggcgtgtgaccgtgcggctgcgctccggaacgacaatttccggttcctcgtgtgccgagattcgtcttggcctggtgacttgcggcgggtttgttcccaagcgggtgttccgtaggtggtttttcgcttccgtaggtggttgccggaggaaaggcgtttgagaaacggcttaaattaagccattctcagacaccaataccagaaccaaccacctacggaaccacaaaaccacctacggaattgagtctggcaacggtgtttggcgcttttactgaagatggtgaaaaacggtatatgccgcttcgagtggctcgattatttcgaatatctgaaaagagtaggaaccccccattagataagtgtcgatagtgcccgcatgacgatatctacatccttgttttccagctcgcgaatgacgtgcagataggtttcctgagttgtagtcatgctggcatggcctagacggcgtgacacgctggcgatcgatacgccggcgaacagcagcagcgatgcgtgtgtatggcgtagaccatggacggaaataactggcacgtccacgtttctgcaatgttttgcaagcacgtcgttggctgttgagttgtagaccttgccgtgcacgaaaataggtctatcatgcggaagatccttgagtaatccagacatttgcatgatgagttgccagtcgagttgcactttacgcacggacgattcgtttttcgtgggtacgaaaccgccgccgtttttataatcccaagttttgttgacggaaagcgtctggtgtgcgaaatcaaagtcatcgggtgtgagcccaagcgcctcagagaatcggagtccggttttcgcgataaggaggataagccaatcccagcttgcctcggccccaagatcaaggtccgcgagcatggcatgcagctcgaattggttgagatacttcattttcttaatgcgtggctgcttgcctttgatgatgactttgcgcgttggatcacgcgggatgagtccttcgtcaacggcatcgagaatggcgcctttgatctgatggtgaaaatccatggtggtttggcgctcatgatgctgtgcatatccgttgatgagctgctggtatgcggttcgatccatatcggtgagtctgagttcagggatgagcttgccgagccaggattgcgtaagtcgatatttgcccatggtcacgtctctgatggcgccttccttgtacgttttcacccactgggcgtagtagtcgcagaacagcgattctgatgtgatggtttcctgcatgagatgcgcctttctaaaaataggggattggcgcagccatcatacttacgctgatgaagggtgatgagcgaatccagacggtcgaagaacgcgccgattcggcgttgctctgcaagcgatggggctattatctcagatgacataataatctcaggggttactcttttttgactgtttgatgatcctgaagagcaactctcaaggtaggcagtgattcgctctgacagtaacgatatcttaataaaactcaaatcagaagaatgagaagaaaatggcacaaattcagaagagcaaacagcatttgcttcagggcgaggaacatgccaaatccttttttcctcacattcaatttgtttacaagtaaacaaggacggtcaacaatctttcttagactattcatcgaattaccaataacggtttcagccgtttcattgttatcaaaagccggcatactgtattccgtaaattcttcattcggtgtttccaacggattaatggttctcgatagctgttcgcatgtgctcgacagcttacgctgttcccaagcgggggtgcggtattcttgtgaaagatgtgcagtcgctcgtggagccgcgcattttgccggcaccgcaatgaggagggatagatgaacaagcagcagctcgcttcgaaaatctgggagtccgccaataagatgcgttccaagattgaggcgaacgaatacaaggattacattcttggtttcatcttctacaagttcctttcagagaccgagctgatgcgcttgaaagccagcgatttcaccgatgatcagctgccgcagcttacggaggataatccggacattgtggaattcgtgcagggtgagtgtggctacttcattgcctatgacaatctgttctccacatggatcaaaaaaggtaatgattttgagatttccaacgttcgtgatgctctttcggcgttctcccgcaatatcaatccggcgcacaagaaagtgttcgacggtattttcgacaccctgcagaccggactttccaagcttggcaccgatgcgaggagccagtccaaggccgcacgagacctgatttatctcattaaggacattccgatggatagccgtcaggattatgacgtgctcggattcatttacgaatatctcatcagcaattttgccgccaatgcgggcaagaaggccggtgaattctacacaccgtccgaggtctcccagctgatgagcgaaatcgtcgcatggcatttgcaggggcgcgagcagatcaagatctacgatccaacatccggttccggctctttgctgattcatattggccagtctgtggctcggcgcaatggcaatccggattccatcatgtattacgcgcaggaactcaaggagaacacctacaacctgacgcgtatgaatctggtgatgcgcggtattcttcccgacaacatcgtcgcccgcaacggcgacaccttggaagacgactggccgtggttcgacacgttggagaacaaggaggaaacatacaatccgttgttcgtggatgcggtggtttccaaccctccctactcgcagaattgggatcccactgacaaggagatcgatccacgcttcagctatggtatagcaccgaagtccaaggcggattatgcgttcctgctccatgacttgtaccatctgcgtgccgatggcatcatgaccatcgttctgccgcacggtgtgctgttccgcggtggcgaggaaggccagattcgtaagaatctgattgaaaaccaccatattcaggcgattatcggccttccggcgaatattttcttcggtacgggcatccccaccatcgtgatggtgctgcgcaagaaacgcgatgacgacagggtgctcattgttgacgcgtcgaaacatttcatcaaggacggcaagaacaacaagctacaggcttctgacatcaaacgcattgtcgacgtggtgtcgaacaaccgcacggtgcccaaattcagccgtttggtgtccattgacgagattcgcgccaatgattacaacctcaacattccccggtatgttgattcgtctgagaatgcggagacatgggatgtgtacgcttcgatgttcggaggcgttccgaagagcgaggtcgagcagcttggggaatattggaacgcctggccgagtctgaaggctgagctgttccgcgataatggtgcttgctatgcctgtgaccatgatgatatcgccactgtggtgcacaacaatgccgatgtaaaaacgttcattgcctcgtatgggcaagccatttccggcctgcctgctaacctacgctcccgtttggtggagcatcccgaacaggtggatgcgctcgggcaggaaacggccattggcgaggaactggatgcgatgattgccgataccgcgctgatcgacccgtatgacgcctatcagaagcttgatgatgcgtggaacggtatctccattgatttggaagtgctgggttccgaaggcttcgatgcggtaagagccgtggacccgaacatggtcatcaagaaaaaaggcggcaaggatgtggaagtgcaggatggctggattggccgcgttctgcccttcgacttggttcagcgtgagctgctgcacgatgatttggccgcgatcgaggcggacgaacgccgtgtgcaggacattgattccgagattgaaaccattttggaaggtttcgatgaggatgacaagcagaatagcgatgcgatcaatcaggacggtgacgctttcgttgccgccgaactgaagaaagcggtcaaggcgatcggcaagaccccggtttctgattttgagcgcggcttggtgcaggcccagaagttgttcgatgaggcgaaaaagctgaagtctggtatcaaaaccaagcgaaacgcgttggaggagaagacctgcgatgcgatcaaggtgttgagtgatgacgaagccagaaggttgctggaagccaagtggattacaccattgcagaagcagctggaggcattgccgaatgctgtgatcgacgagttcatcggcaaagtgaacgcgttgaagaacaagtatgccaccacatatgccgatgtatgcggccaaatcgatgaagcggagaaggaattggctggaatgctgggcgatttgaccggcaatgctcgcgatatggcgggtctggaagagctcaaagcactgctcgggggtgaatgatatggccgaacagcatgaaaaagcgttggttccgcagattcgtttcactggttttactgacccttgggaacagtgtaagctgggggaactgtttgaggagcattccgaaaaagatcgagatgacttgcctgctcttacaatcattcagggcggaggcacagttcatcgtgacgagtctaataggaatctccagtttgatagaaacagtctttcaaactacaaagttgttgatacgggagattttattgtccatcttcgttcgtttgaaggaggactcgaaaaggctacatgctgcggtttggttagtcccgcttatcatatcttccgtggcaaaaacgtcgattctgatttctattatctctatttcagatcaaagcgttttatcgatgcggatttgaagccgcatgtttatgggattcgcgatgggcgaagcattgacatcgaagggatgaaaacgatatttatcccatggacgaatctagccgagcagcgccgaatcggcgcgttcttcgaccatctggactcgctcatcacccttcatcagcgtaagtatgacaagctttgcgtgctgaaaaaatccatgctcgacaaaatgttccctaaagggggttcgctgtatccggagattcgtttcgccggtttcactgacccttgggaacagcgtaagctgggggaattagcatctaagcgaattgaaaagaatacgaacgggattaaggagacgttcaccaattccgctgagcatggtgttgtaagccagttagactattttgaccatgacatcacaaacgatgcgaatattggaaattattccgtagtgcatccagatgacttcatatacaatcccaggatctcggccgtagctccatgcgggcccattaatcggaataaacttgacagaaacggcgttatgtcgcctctttatactgttttttcagtggatgacacgatagacaagctatatctggagcattatttcaagacaagcagatggcatcaattcatgtttctcgaaggtaattccggtgcgaggtctgatcgtttttctatttcggattcaatctttttcgagatgcctatccagtgcccagtgttagaggaacaagaattaattgcgtcgtttttcggccgtctggactcgctcatcacccttcatcagcgtaagctcgaattactccggaatatcaagaaatccatgctcgacaagatgtttgtataggggtgttcatggcaataatcacgttatttcacggttctccgtacgaatccgtgacccccgaatacggtttaggcaacgacaaacacgactacgggcgtggtttctatctgaccgcgaatgtggaactggccaaggaatgggccgtgtgccggccggatgagtccaatggctgggtccaccagtacgaactggacacgaatgggctgcgcatcctggattttcaggaacatagcgtgcttacctggctggctgagctgatgaagcatcgtgatgccgctgattccaagcgttatcgcgtgctggctgcgaagttcatcgccaaatacggcatcgatgccagcggctatgacgtcatcaaaggctggcgtgcgaacgcctcgtatttttatatcgccaaagaattcgtccgcgacaatgtggacgtcgatatcttggaggaactgctgtcgcttggaggtctgggcatccagtattgcgtcaagaccgcaaaggcgtacaggcaactgcgcgaagtcccggacggcctgctttccgtcagctacagcgaattcaacgacaaatacaatcagagggatgtcgaggcacgccaaaacatgcgcgacctcatcgattccgatgccaatacggtgaccaacgtgttcagcacgttgctctaggggtgatgacaatgcgggcatatccagaggtctaccgggatgatgtggtggaaactcaaggcaagctcttcgactgcgtggcacagtcgtttccgggcaagagcacggaggacttcatcaccgtatatatggcgagcaaaacacgcaaaagcattgatgaggccaaagcctacgtcaacacgatggatgcgaaagagctgtggaagtatttcaccgagactgagcactaccagttgaaggacggcagggcgctcgaaggattcatgcctgattggattggcgaattctacgcctactaccaatggttctacggcattcccagtgctgaagtgattgccaaggtgccgctggacttcctgaagaaagcctatttcgggcttcatgatctcgatctggagcttgcggtgcggaaagtcggcgaagaatgacggacatcatctgcttccataatcctgatgaggagaacggatacctgagcaactggtatccatcgcgcttcgttgtggttgatgtcgagttttcctcgatggaacagtacatgatgtaccgcaaggcatgctgttttaacgatgccgaaacagccgcgcggattcttcgaaccagcgacgtggccgagatcaaacgacttggccgactggtagccggttatgacgatcacgtatggaacggcgttcgccaaatcgaagtctatgaaggattgcttgccaaattcagtcagaacgccgaactcggtgcgcaactcgtagcgacctgcaatgcgatattggcggaatgcgccgtcaaagaccgcatctggggcatcggcttgtcaatgcatgacccagccaggctcgatccagcccaatggcgcggtcagaacctgctcggatacgctctaatgctcacaagaaagaagctcaaccgcgtagatgagcgataatacggccgttttcccgtatcaatcgcccccgcttgggaacagcgtaagctgggggaactaaccgaaagctattcaggaggtacgcccgctgctggagaatctgagttttacggtgggtctattccttttatcaggtctgctgaaattgcagctgaatcgactgaactctttcttacggaaaaaggatatgaatcatcctctgcgagaatggtcaaacccggcgatgtgctgtatgcattgtacggagcgacaagtggcgaggtggctgtatcgaggcaaaaaggtgccatcaaccaagctattctcgccatactccctcgcgacgattgtgatgcaagatacatcactgcttggctgaggaagcaaaaaggttacattgtcacaacctatttgcaaggtggtcaagggaatctatcgggggtgatagttaagaaccttgaagtattcatcccgtccttacctgagcaacaaaaaatcggctttatgctgagtcaccttgactcgctcatcacccttcatcagcgtaagtattgtggtgttgcttcttggatgttaggggttgcgctcgtaagattgagctcggaaaagtgacggtgcgttcggggagatgaaacatgttctacgataaagaatcggatttcgaagacgatctggtcgcggtgctgaaacgccacgggtggaccgatggtgtgttggaatacccgactgaacaggatctcatcgataactgggccaacatcctattcgacaacaacaaaggcatcgatcgcctgaacgggcagcgccttaccaagggtgagatggcgcagatccttgaacagatcgaaacattgcgcacgccattggcgttgaactccttcatcaacggcaaaaccgtgtccatcaaacgtgacaatcccgcagacacagcacatttcggtaaggaaatcagcctgaagatctacgatcgccaggaaatcgccgccgggcaaagccggtaccaaatcgcaagacagccgatgtatccagcgaaaagcaagatgctgaacgatcgtagaggagacgtctgcctgctcatcaacggcatgccggtcatccatatcgaactgaagaaaagcggcattcccataagccaggccaccaatcaaatcgccaaatacgcgcatgaaggcgtgttcaccgggctgttcagactcgtgcaggtcttcgtggccatgaatccggatgatgccgtgtacttcgccaatcccggtgaaggcgatttcaacagcaactacttcttccactgggctgacttcaacaatgagcccatagcggcgaacaaccatgtcgggcaggatgaatggaagcgtttcacatctgatctgctatccattcccatggcacaccagctcatcgggttctatacggtcgccgattccgcagacggatgcctcaaagtgctacgcagctaccaataccaggcggtgaacgccatttccgaccgtgtacgcacctgcaaatgggatgagccggtgccaagcggcacgccgggccgtccgggcggctatgtgtggcataccaccggctcgggcaaaaccatgaccagtttcaaagcggcgcagctcattgccgattcgaaagatgctgacaaggtcatcttccttatggaccgtatcgagttgggtacgcagtcactgctggaataccgttcgttcgccgatgatgccgatgacgtgcaaggcacggaaaacacggatgtgctcaaggcgaagctggcaagcatcgacccgaaggacacgcttatcgtcacgtccattcagaaaatgagcaacatcaaagcaggcgaggggcatatcaccgaagaggaagtgaagaagctcgccggcaaacgcatcgtgttcatcatcgacgaatgtcatcgttccacattcggcgagatgctgcaggatattcgccgttccttcccgaacgcgttgtatttcggtttcacaggtactccaatccatgaggagaaccgtaagaagggcgcgactacgtcaatggtgttcggtgattgcctccaccggtacagcatcgccgacggcatccgtgacggcaatgtgctcggcttcgacccgtacatggtgctgacgtaccgagacagggacgttcgccaggtggttgcattggagaaggcgaaggcgtcgacgattgaggaagcccaagcggatccggcgaaagccgaagtgttctaccattacatggatccgaatcaaatgccgatgggacctatggaaacgcaggccggagaacgcatcaagggcattgaggattacctgacttcggcacagtacgcgcagggcaccccgcatgagggcaaggttgtggaggatatcctcgaccaattcccattgctgagcaggggcaacaaattccatgcgatgctggccacgagttccattcccgaggcgatcagctattaccgcttgttcaaggagcgtgcgccgcagatgcatgtgaccgcgctgttcgaccccaatgtcgataactccaacggcgcgattctcaaaggggacgcgcttcaggagatcatcggcgattacaacgaactgttcggcaaggatttcatcatccccacatggccgaagatgaagaaggacatcacggcgagactttcccacaaacgaccgtacctgaccgtcgaccagcatcgtgaggagcggattgatctgctgatcgtggtcgaccagatgctgacgggcttcgattccaagtgggtcaacacgctgtatctcgacaaaatcatcgactacgagaacattatccaggcgtttagccgcacgaaccgactgttcggccctgataagcccttcggaacgatacgctactatcgcaagccgcataccatgaaagggtatatcgaagcggcggtgaaactgtattccggagacaagccgcttgatctgtttgtgcagaagctgccggaaaacgtgcgtctgatggatgcgcgtttcgaagagatcgcttccgtgtttcgcgccgaaggcgtggaggatttcatgaagctgccggagtccgtggaagcatgccggaagttcgcgaagctgttctcggaactcaatgatttcttgaagccgccaaagtacaaggatttacatggcagcagcgggaatactccgtcacccatgacgatggttcggtggaggttgtgcggccggaactcgatgaacgcacatatatgattcttgtacagcgatacaaggagttgtttgctggagatggcgaaggccatagtgagggtcctgaggctccatacgatcttgatgggcatatcaccgaaatcgacacgggattgattgatacggattacatgaacgccaacttcaccaaatggctcaaggcgcttggtggaggagatccagacctgttggcatcagctgaggaggaattgcataagtcgttcgcttcgctcagccaagaggaacaacggtacgccgaactgttcatgcatgatgtggaacgtggtgaaatcgagttggaggaaggcaagacgctgcgcgactacattacgtattatgctaacaacgccaagaacagccaagtggagaagatcaccaaggcgtttggcgtggatggagctttgctcaacgagatgatgcggcttgatcttaccgaagcgacgctgaatgaatttggtcggttcgaccagttgaaagcgtccatcaacaagcctttggcaaaggcgtttttcagcaagccggatagctctgtcacccaattcactgcgaatcttctcgccaccaagttgctgaaaagctttatccttgaaggaggattcgatctggacgatcgtaaatagcggacggcagtaaaacaaggggagaatcatgtcggttgttgacgaagcaaaactggggtatctggactttctttcacgtgaggatcgggtacgccaccatcgctacgttgaggaaatgaagcagtatgacatgatgcgctccggtgacatcaatgccatttcggaaagcgcgaaactgtgggattccggactatacggccatctgtcggacgatcctctgaaaaacgcgaaataccgtttcgtcaccaccattaccttggccacgcgtttcgccattgaaggtggcatggacgaggaagacgcatacaacgcctccgatctgtacattcaagatcttgacaattgcaagaccccggaagacgtgcgccgactgcacaccgacatgatgacattcttcacatgggccatggccgacatgcagaaggcggaaacacattccaaagccgtcaacgaatgcctggactacatccactaccatctgcatgagaaaatcaccgtgcccatcctcgccgagcatgtgcatctgaaccccacgtacctgtcggagctgttcaaacgcgaaacgggcacgaccatatcgcaatacatcaccgacaagcgtatggaagcggccgagaacatgctcaaatactcggaatacagcttcgacgagatcgcccagatcctcgcataccggtcgcaaagccacttctcgaaggtgttcaaaaaacattccggcatgacgccgggggagtaccgcaccaagtacgcgcagaacggcatctggccggagtgattgcgatcacggcgtctaccacgccggttgcggtgaaccgccggtgacggcaccgcgaaattcgggtgtgccaatcgtgaaatcgacgtgtccgcgcgtgcgaaacacgcgcgaatcagctacggtggaagcattcaatgatgatgcgcgccaccggccgaatgaacggcggaacaaggaacgtgcgcgcaggatgtggatgaaagcgaaggaataaacgaatatgggaatgccccttgatctgtatgtgatccgacatggcgagtcggaggcgaacgtcatcatcagcgccggcgaacagggtgacaactcgctgtatacgcaggacaacgtcaccgtgccggaccgttcgtggaggctcaccgccaccggacgcaagcaggccgactgcatcggccgttggctcgtcgcgcagcagccgctgttcgaccgctacctcgtttcgccgtacgtgcgcacgcgtgagacggcggccacgatggccctgcctaaggcgaaatgggaggagactcgcgtgctgcgcgaacgctcctggggtgagatcaacaccatcacgaaggacgatttcaaaaccaactacgcgcgcaactggatgttcaagaacaccgatccgctgtactggcgtccgccggcgggcgagtccatcgccgacgtggccgagaaccgcgtgcacaacctgctcacgtccctgaaccgcaaatccgatgcggaatccgtggtgatggtcagccacggcgacctcatgctggcgctcatgctcaccttggaagacctgtccgacgaggaattcatgcaccgtgcggcctccgacgaatggaagatcaccaactgcacgtgcttccactattcgcgccgcgaccccgccaccggacgaacgcacaagcggttccgttgggagcagacggcgcgtcccgtactcgacgagacggatggtcgctgggtggtgaaagtggatgattggcgtgaattcaagcgtcccgtgctgtcgaacggcgatttggtggacgtggtgcacgccgtcgaccgtcacctgtgacggctgccggtatacgttttgtgactgcgatttagccccctatcgctctgtggggcgtcacgtatcggcgcttccgctacaatggcgtgtgattgcgcggcgcgcgttcttgttgcgcgtcgtaaagagagttaggagacaatcgcatgtccaatccaatcgcgggcctgttcacgtggaagctccacggcgacggcaaaacgctgaagcccggcgaggtcgtcgaacctgacgagaggctgacctggccgcgcaccgcggaaatcggcgcgcagcacgtcatcgccatgttcggcgccacgttcctggtgccgattctgaccggtttcgacccatccaccaccctgttcttcacggccatgtcgaccgcgctgttcctgctgatcaacaagaacatgctgccgagctacctgggctcgtccttcggcttcatcgccccgatcgcggccgtcgccagcgcccacaagggcctcgccgtcgcatccttcggcatcatggtcaccggcatcctgctggccctgatcggtgtgctcgtccattacgcgggcgccaagtggatcgacatcatcatgccgccggtcgtcaacggcgccatcgtggccatcatcggcttcaacctggctccgagcgtgtggaacaacttcaaagtcgctcccgacaccgccatcgtcaccctcgtcgcggtgctgctcgtcgcagtgctgttcaagggtctgctcggccgactcaacatcctcatcggcgtgatcatcggctacgcgtacgcctgcttccgtggccaggtcgacttctcagccatcggcaaggccgcatgggtcggtctgccggaattccgtctgccgcaggtcgacttcaccatcctgccgatgttcatcccggtcgtgctcgtactcgttgccgaaaacgtcggccacgtcaagtccgtctcccagatgaccggccgcgactatgacgaccagatcggcaccgcgctgttcgccgacggtctcggcaccaccatcgccggtttcggcggcggctccggcaccaccacctacggcgagaacatcggcgtgatggccgccaccaaggtctactcgaccgccgcatactggtgcgccgccgcgttcgcgctgatcctgagcctgtgcccgaagttcggcgccatcatcaacaccatccccgccggcgtgctcggcggcgtgaccaccctgctgtacggcatgatcggcatggtcggcatccgcatctgggttgagaacaaggtcaacttcgacaagccggtcaacgtcatggtggccgccatcaccatgatcatcgccgtcggccagttcgagttcgccttcaacggcatctccttcaacggcatcgccatcggcaccgtcgtcatcctcgtcgcctaccacggcctgaaggccatcggcaaggcgaccggcaccatcgccaaggacgatccggacatcctgtaacggatcgcatctcacgctggctagttcaacgcccgtcggccaaaaaggtcggcgggcgtttttcattgccgttttcgtcaatcgattgacgtgttgcttcgcatacgttttatgatggtatctataagcgattgcgcaatgtggcaaaggaggcaacatgagcactgcggcaggaaagaaaatcgcgattgtgaccggttccgcgcttggcttgggatatgagctggcacgtcagctgatcggcaaaggctggttcgtggccggcatcgatttcaacacggcccgtcaggaggaactgtcccgcacgttcggcgcggacgaataccgcgccttcgtcggcgacatcagcgacgaggcgttcgtgaaggactccgtcgcggccatcaaggagatcggctacatcgacctgctcattaacaacgcgggacagccgtcgttcaaaaagccggtcgactacgaggccgccgacgtggacaagtgccttaaggggctcaaaggcatgattctgtggagcgtcgaaacattgaaggccgacggcgagcaggacctcaaaatcgccaatgtcatgtccaccgccgccacacgcggcaacgccaacgaatccgtctactgcgccaccaagtggggtgagaaggggtatacgacaagcctcaaggcggcctacaagggaaccagtgtgaaggttgtgggcgtgtatccgggaggcatcgacaccgacttctaccatgacagccacgattacgtgtcgttggacaagcagcattccttcatgagcgccgcggaactggccgaagtggtgctgttcaacctcgtcaacgacgcgaatctgacggtttccgacatcctcatcgaacgcaactaccggtagcgtcggccaccagtcacagccaaggcaaaagtatcgggcatgggctattgttaacaggtttgcgcaacgtgcgcaatgtttgacatgaaaggccattgtgcccgataccgctgtgattgaaaatgaagatgccctcgccgccgatttcgatgaggcgggcgaggaggaggaacgcccccagacgttcgccgaactcggcgttcccggcccgttggtacgcgtgctcgcggccgatggcaagaaaaccgctttcccgatccaggccgacacccttcccgattccctggccggtcgtgacattctcggccgaggccgtaccggctccggcaagaccctggcgttctcgattccgctggtcgcacgcctaggtgaggtcgacgccgacgagtacgagaacatgagccagttccgccatgaggtggaacaggtgcgcaaggggcatgccgaggaacggcgcgccgacgatttcctgccgcacccgcgcggtctggtgctcgctccgacccgtgagctggccaaccagatcaacgacgtgctgatgccgctcgcgcagatgtacggcatgaccaccaccaccgtgtatggcggtgtgcgctacgcccgccagatccgcgatctaagggccggcgccgatatcgtcgtcgcatgcccgggccgtcttgaggacctgctcgaacagcatgcgctgaccttggagaaggtcgaagtggccgtgatcgacgaagccgacgaaatggccgacatgggcttcctgccgccggtcaagcgcctgctcggccaagtgtcgttcgacgcgcagatcatgctgttctccgccaccctcgaccatggcgtcgacgaggtggtgaacacgttcctcaccgatcctaagatccacagcgtcgactccgccaccgcggccgtcgacgaaatgacccaccacgtgttcgaaaccacgcagggcgaccgtcatgagctggtccgcaccctcgcttccggcaagggacgccgcatcctgttcacccgcaccaaattccagacccagaagctcgccaaggacctgacgaagaacggcattccggcggccgagctgcacggcaacctgagccagaaccagcgtgatcgcaatctcgcagccttcgaatccggcgacgtgaacgtcatggtcgccaccgatgtggccgcccgcggcatcgacgtgtccggcgtggagctcgtggtgcaggtggagcctccggaggacccgaaatcgttccttcaccgctccggacgtaccgcgcgagccggccattccggtgatgtggtgaccatcgttctgccgaaccagcgccgccgcacccgccgcatgctgcatgaggccggactgaaggtcaagccgatcgaagtgacccacgattccccggaagtgttggaattggtgggcgagtcggccgaaccgcgtttcggttggacgcttgagcagtcccagccggcgggcaatccgcgtcgcaggcatggcaagggcggcgacggttccgcggaaaacggcgggcgctccggacgcaaccgttccggtggacgcaacaaggaccggggcaaggacaagggcggcaagccgttcaagtccgaacgcaaggaccgcgcgaatcgcaagggacgtgaagagcgcgccgaagtcgccgaacgcgagcagcgtttcgaaccgaaacagaatcgcgccgaacgtcgcgccgccaagttcgaaggccgcgacaaccgcgaatacgaggcacgcgagcatcgttgggaacatcctgaaatccaagaggagaagcgcgagaagcacgaggagaagcgcaacaacaagcgtcgcgaaaagtacgcgcggctgcatgagcagcagcgtgccgaagccggcgaacagcgtggaaccgacaatcgcaagcggcgctccgacgagcgttccgatcagcgtggccaatccgataggaagcccggcaaaaagcagtatgcgaaaaagcagggcgcgccgaccaagaagcagcgcaaggccgaagcccgtgccgaacgccgttacgaggacgatcgccaataccgcaggaaccgcgacgaacgcgacgaccgccgtcagggcggcaaacgcatccatcgcaaggaaatccgcgtgattcatgacgagcgaggcgaggacgcgaagcgttatgaccgtcgcatggaagccaagtatggcgattccggtcgtcgtggcggtcacggagaacgccacgacaagcatgcgggcgaaaggcagggcaagccgttccgcaagcatgcgaagatccgcaaggcgccgttccgctcccgctgacgtacgtcaacggtcaagcaaaaagccgttcattccagcaatcgcaaggaatgaacggctttttctatacgggatatcgcagtatcagccgttgaccggctgatactggtcgagcgcggtgaagcaacgtttatagaccatcagcatgatgatgctgtccgccagcagcgtaagcgccgcgatggtggcgagaatcatgaactggtatttcgccgcgtcgatggggtcgccgccggcgatgatctgaccggccatcatgcccggcaccgtcacaatgccggcggaggcgagcgacgcggtggtgggcagcaatcccagacggatcgacgagacgatacttggacgtgccgcctcccacgtggtggcacccaacgccagcagcgtgtccacttcgtcacgacgttccttcatgctttcaaagaaccggctcaaccccaccgccaacgccgaaacggtgttgcccagcagcatgccggtcaacggcaccaccaattgcggcgcataccacggttgcggacggatgatgagctcggtgaccaacgagatcatgatgagcatggtcacgaccagactcaggaacaccggtccagccaagcccttcggaacacctttcgcacgcgaaagagtgacctgcacggccgcgatgagcatgaacgccaccagcagcagcaccagccacggattgttcgaacggatgacgtactccatgatgaagcccatcgcgcacaattgcagcaaagctcggcatgccgaccacagcaacgtacgtcccacacccatacgcatggtttcggagatgccggcggcaatggccaccatcaccagcgcggcgatgagaccccagatgtcgatcgcatagtagttgccgttcatgcgacgctcccttctaccgtgttacccgtcgaagtactacccgtcgcagtaccgtccgcttcggcgttgccggactgcgtgagcgtgccatcggcaagacgcgtgacacgtgtggcatggccatccggcggccggtgccggatacgaacgatcgccatgccgtccgccgccgctttggcgaggatacgcgccactttctcggcgttgtcgtcatccaatccggcgtccacttcgtcggcgagcagcaccttcggacgggtcagcaacgtgcgcgcaaggctcacgcgcgccgcctgaccgccggacaagtcgtgtggcggacggttcagatcgatgtcggcgcaacccatattgtccaaggtctcacggattctgccgtccggcaacgcgtcggtgggggagatcctgcgtggtccctgcttcgttctcgccgactggcgtatggcaagcgtgaacggcagacgaatcgcctgcgccaccgtctcgcccaacagcaccggcttctgcggcaggtacgcgacctgcgcgcgccactgctgcggggtgaaatcgtcggcggaacggccatccaaccgtaaatcgcctgacgcgtgcggattgagccgtgcgaaagcggtcagcagcgagctcttgcctgcgccggacggtccgaccaagtccacgatttcgccaggctcgatggcgaaagacaatccggagaatatggtgcggcgttcgccgtcgaccataatcgaacagcgcacgttcgatgcttcgaatacgtatgtcatagccaaaaccatacgccaatagcgaacggttcacggcggtttcagggttttccctgagttttgaggcgaaatcagccataaggatgacgcgtgcccgttattttgcgtactacaactgtcaagttgaaggaaaacctatatgttggggatgggaaatatgcgtcagtggcttatgaacataagcctggtcggaggctggtttccggcggcggcgttcgccgtcatcgcagtgctgtccgtaaccctgctggttagcgcggccgtttcgaaacgggacggacgcatactggctaccgtgctgccgatcggcgttgcggccgtgtccggaatggtcggctatgtggtagcttggctgctgtccgacgtgttcgtggtgttcggcgtcggattgggatcccgtgtgatgtcttgggtggcggctggtttcgccatcgctggtttcgccatcgtgcatatcgtgttgagcaggggcatgatgcgcgtggccgcggccatcttgaccgtattcgcgatactggccgcggcgatcggcatcgaccaatcgtacggcgaatacgccaccatcggctcgctgttcggcgaggattcctacagccaagccgatctgaccggactggccaaacgcaaggacctcatcaccgtcgcacagtggcgcaaacaggccgccaacggcacaatccgcaatattccggcgaacggaaccgtcaacaaaatcgacattccggccacgaaatcgcagtttgaagcacgcaaagccctcgtctacctgcctccggcggcattggccgactcgaaacgcaagccggccctgccggtcgtcctcatgctgagcgggcagccgggcagtccgggacgcgtcttccaagccggcggcatccaaaccatgatggacggatatgcgaaaacccacgacggactcgccccaatcgtcatcgcagccgatcagcttggcgccgattcgcacaacacgctatgcgtggattcgaaggtgtacggcaatgcgctgacctacctgacgcaggacgtggtcgactgggtgaaaaccaacctgcccgccgcacaggatgccaaggattgggccatcgccggattctcgcaaggcgccacatgttcgctgcagatcggcgtgaaccatcccgacctgtttggcaccatgattcccaccgacagcgaaatcaaaccgaccaacggcagccgacaggaaatgatcgaccggttcttcgacggcgacaccacagcctatgagaaccaagtgccggtcaacgccatccgcaaccacgcgcccacccatcagatgctcatcataggcgcgggggagaaggacaccacctcaatacgcaacgtcaaaacaatcgcgccggtcgcggcgaaagccggcatgcgcgtcgccgccgtcgaatcgtccggcaacgcacacgactggcacgccgtgcaggacgtgctgcgttacgggctcgccgtattcggccacgacactggactggatggtgcgaacccgaacctatccgactatccgaatctcaaacgcatcacgatatgacgatcctgaacacaaacccgcaagcctgagaatcccagaaaaggaaagaaatgactcaaacgcaaaccgcacctgctaaaccagccgaggcatcacccgcgaaaccactgttcggcttccgcgcgctgctcgccgatctggccggatggatcagacgacacctgctcaccgtctgcctcgtgctgttcgtcatcctcatcaacgtgggcacgcagatcgtgtgcgcgctcatacgtcagccgttcccgccgagcctggccaaagtaagtttcgaagcgctcgcacgcggccgctggtacaccgcgccgatatccatgctgtacgtgccgaatctgggccgtctgctcatcgacgttccgctcatgctggttgcgttcggcctggccgaatcggtgatcggcaaaatcaaaaccgcatgggtgtccgtcatcaccacactgggtggcgtggccttgggcatgggactgtgctccctatccgacgggcgcagcccccaatggcatgcgatctcgcatgatggcgccatccttggtccgctgattctcgtcgccggcacccttatgtgcgccagcgcgttcacaaccatgctgtggcgccgccgtatccgcgtgatcggctatgcggtcgtgctcatcatgttcctctaccgaggcgaggtgagcgactactgcctgcttgccacttcggtgattggtcacgtgctcggctatctgatggcctcccgcacacatggcgacgaataccggcatggcgccatctacgaaatgcgtcggcttatcggcatcgtcgcgggcgtgcaggccatcggctcgctcgtcgccgtctcgtcacgccaatcgttcggcctgctgtccatgttcggactgttgaccggctccaccggcttcgacaccggacgtgtggtcgactgcctcagcggcgcctcgcatacggactgcttcacgcaataccgcatgatgcgtttcaccatgcccggcaactggctggtatccatcatgccgacgctgatgctgctgctcatcgcctggggtctgtatcgaggccgtcatctcgcagccgcgctcagcatcgtgttcaacgcatgcaccattgcgctatcgacggtgttctatgtggctattccgctgtcctacgtggacggccccgacgccggtgcatacatggatgcgatatccgcattgcaacggcacggcgcattccacgcgatgctggccacgatggcgttgccgctgctgtgcatcgtcatcatcatcctgttccgcgcatgtttcaccattcgcacgaaaagcgagaccgtgctgcgcggtatcgccatcacgttcgccgcattcgtattactgggattgctgtacgtcggctacggcctgtccatgccgtccggcttcaacgaaacgccgctgctggtcgatctgatcgcagactacgtgcagcgtttgctgccgattggcctgctaagtggcgtggaaccggcgttcgtgccggtcggattgctttccgaaatcgtctaccagtgcgtcggaccgatgttttggctggtcgcgctgtgctgcgcatggggtggcctgcgtgaccgttccatgattaacgacgcgtaccgtcaccgcgtggacgagatcatcggactcggcggcgaatccatgtcgttcatggccacttggaaaggcaacgactactggttctccgccaccggccgttccgccatcgcctaccgcgtgtcgtacggcatcgcgttgaccgtcaccggacctttcggcgacccagacgaatatgaggacgatttgcgtgcgttcgccgacttctgcacccaacgttccctgacaccggtgttctacagcgtgcacgccgaacaacgtgacgcgttggtctccgccggttggaacgcgctcgacgtcggcaccgaaatggtgatcgacccggccgcatggcagacgcgcggcaagaaatggcaggacgtacgcaccgccatcaacaaagccaagcgcgacggcatcaccgacgtgctcgccacattcaaggaatcgccgttctccgtgcagacgcagatccgtgagatctccacgcaatgggccggcgagaaggccctgcctgaaatgggcttcaccctgggtggtgtggacgagctggtcgatccacgcgtcaaactgctgtacgcggtggacacggacggtaaggtgctgggcgtcaccagctggctgccgacctatgagaacggcaaagtggtcggatggacgctcgacttcatgcgtcaccgtaccgacagcgtcaacggcatcatggaattcctcatcgcccgcatggccgaacggctgcgcgacgaaggcgaagtgcgattcatgagcctgtccgcggcgccacttgccggcatgagcggcgaaggccacgaacagggggagagcgccgtactcgaccacgtgctgcagatggtggccgacatcatggaaccggcttacggattccactccctgttccgcttcaaactcaagttccatccggatgaagccaaagtgtacatctgctatccggatccggcgaaactgccgcagatctcgcttgccgtcgcgcaggcctacgtgccgtcgctcaccccagccgaagccatgcgattcgtacgcaccatcgtgcctacgaaaacgaactgaaaccatgcgaccggttgacggcccgtcatccctgagatgggccgtcgctttgggtgcgctcggggctacactggggaaggttcataaaaagtactacgtttctccatgaaagggaacagtatgtcagctgaagcaaacgtcggcgtcgtcggtctggctgccatgggcggcagcctcgcacgcaatctcgctcaccacggcaacaaggtggccgtgttcaaccgcacctacgcccgtaccgaaaagctcatgaacgagcatggcggcgaaggcgagttctatccggcgaagacgcttgaggaattcgtggacagcctcgtcaagccgcgcaccgccatcatcatggtcaaggccggtgagccgaccgacgccatgatcaacgcgctcgccgacctgatggagccgggtgacatcatcgtcgacgccggcaacgcctacttcccggacaccatccgccgcgaaaaggaaatcagcgcccgcggcctgcacttcgtcggctgcggcgtgtccggtggcgaggaaggcgccctgcttggtccgtccatgatgccgggtggttccgaggaatcctggaagaccctcaagccgatcttcgaatccatcgcggccaaggccgaaggcgaaccgtgcgtcacccacatcggactcaacggtgccggccacttcgtcaagatggtgcacaacggcatcgaatactccgacatgcagctcatcgccgaaagctacgacctcatgcgccgcggcctgggcatgaccccggccgagatcggcgacgtgttcgaggagtggaacaagaccgaactcgactcctacctcattgaaatcaccgccgaagtgctgcaccaggtcgacaagaagaccggcaagccgctcgtcgacctcatcgtcgaccacgccggcatgaagggcaccggcacctggaccgtgcagaccgcactgtccctcgccgtgccggtcaccggcatcgccgaagccgtgttcgcccgcggcctgtcctccgaagccgacctgcgtgaggaagcccagaagcagggcttcgccggccccgacggcaagctcaacctgaacgacgacgagaagaaggccttcatcgaagacatccgtcaggccctctacgcttccaagatcgtcgcctacgcacagggcttcaacgagatcaccaccgccgccaaggaatacggctgggacatcgacctcgccgccgtggcacgcatctggcgtggcggctgcatcatccgcgcgaagttcctcaaccgcatttccgaagcgttcgaatccggcgaggccaacgtgtcactgctgttcgccccgtacttcaagaacgccatcgaaaacgccgagaagtcctggcgcaacgtggtcgcccaggccgccatcaacggtctgccgaccccggcgttcgcctcgtcgctgtcctacttcgacggcctgcgttccaagcgtctgccggccgccctcatccagggccagcgcgactacttcggcgcccacacctaccagcgcgtggaccagccgggcgcgttccacaccctgtgggccgagccgggccgcgaagagatcgaagcctgatcttttccttgcctctgtgtcagggcggatatgccagaggtcttgcgatgtgttccattgcaagacctctggcatatgcatattactgagctgcgatattgccgtaccgttgcattgacggagcatagtgtcgctccgtaagcagaacgaatggtacttgtggttgtgatgcatcccatttgcgtttctaggggagtctaatgccatcgtctaacctccttccgagaggttttcggaagctatggggcgaaataggcggcggattgggattccgtaggtggtttttgcgttccataggtggttggtcttgggagcctgctgcggaaaaggccggaaaccggccttttccatgaccccgatacttggggcaaccgcctacggaaacgcgaaaccgcctacgaagctgcagtccagcgggaacctgcgtcaaaacgacactcaacaatcaatcaacactcaaaaaaaaggggtgtctcacggcatgagtcgcgggacaccccctgttacctgtttcggatgaacctcacaacttggaagcggcaccctcgtcaatgagccagagcagttcctcgccatcggcgtaggagcttggggcatgcgggttgttgcgctgggcgaaggcggccttgaccgcgccggccttacgctcttcggaggtgaacacccacgtatgcttcgaccgggcgatcatcggcacggtcaatgtcaggcgcagcggcggcggtttcggcgaatcacgcacgccggccaccagcacatgcggatcgtcgatttcgacttcgccgtggtcggggaacagggacgcgaaatgcgcgtccggacccacgccgaacatcgcgatgtcaagcgctggctcgctgcccaactgctcgacaagctcccgctggtattccgcggcagcggccgccagcacggcatccgtctgttctggggaagcggacgcgatctcatccgcgtcacgtccgtcagccggcatttcgtggatgtttccagccggcatgaggccatcctcgataagcttgccgaaccaagcctcgcgcgcctgcttggcgttgcggtcgtcatcatcggccgcaacgaaacgctcatcgccccaccacacgtgcacacggcgccaatcgacggcatcggccaacgggctttcacccatcaccttaagcacgtaaatgccatcggtgccgccggtcacggcaatgtccacacgctgccggtccggctcggccagcaggtcgatgatggtcagcaatgtgcgcgcggccacggcctgcgccaatacttcgggattcggatacacaatggtcttacgttctgccatattcgctccttatacgatgccgccccaccgattcacggcagggcgactggttgtcgtttgacggttcagcgcttcggattgatcagatcccagccctgcgtcaccacttccgcatagatctcatccgggtagagtcggcccagctcctcgcttaggcattcctccaatgtgcgcgccggcacgctgatggtctgcggcgactgtcccggcacgttcagcacggcgatgccgtcatccgtggagggacgttccaggctcatcacgccgtcggaacggctaagatacacgccggtcaccgcggtggcgttcggatcgtcctccaccaccaccggcacgttgagccgtagcctcagccatgcggccagcaggtccatcggcaggtaatccttcttgccggtcacacgcacgccgctcaccggcaggtgcggcggctggtcgagcatggaagccagcatcgcacgccaaacggtcagacgcgtccatgacatgtccacgttcttcgacgaccagttacggcgcagatcgtccatcgtgcgtcgtggattcgacgaatgcatcgcatccgtgatacggctgcgcgccatcgagcccaacaaatcggtggacaggttcgccggcgcctcgttcggccaccaggccaccaccggcgcgtccggcaccagcagtggaatcaccaacgtatccgcgtgatacaccagaccgccgagcggacgcagcacgatgatctcgcccgcgccggcgtcggaaccgaatcgcacttccgcgtcgaggaacgtgtgcggctgaccgtcatcggtatcggcatccatcttgcgcgaattcggtgcgatggcgatcacccggcaggggtgttcgcggctggcgctgttcgccacttcgaggtcgtgctccagcgacgcctcgttcgtggagatcagcagcgtgagcacacggcccaaggcggcctcgccacgctcttcgtgcagttcgtcgattttcgccgaaatctcacgggtttcggtgttcttcatggtaatgatcacggcatcctccaacggtgtccatcgcgggccagcatctcggtggcctcctgcggtccccaagttccggaacggtatggctgcggctggccgagtgtggaccagaattcctcgatcgggtcgaggatctgccagcttagctccacctcacgtgtggttgggaacagtggcggatcgcccagcaatacgtcaagaatcagacgctcgtaggcttctggagacgattcggtgaatgaacggccatagccgaaatccatggacacgtcacgtacttccatcgacgtgccgcccggcactttcgcgccgaatcgcatggtcacgccctcatcaggctgtacacgaattacgatggcgttcttgccgagttccttcgtggcggtcgtttcgaatggcagatgtggcgcgcgtttgaaaatcactgcgatttccgtgacgcgtttgccaagacgtttgccggtgcgtaggtagaacggcacgccggcccaacggcgtgtatcgacatccaaccggatagccgcgtacgtttcggtggtcgatgctggattaatgcctttctcatccaagtagccgacgacttcgtgcgatccttgccatccggcggcatactggccgcgggccgtatgcgcggccaaatccttcggcagacgcacggcggacagtaccttcgtcttctccgccgtcaaatcggcggcggagaaggagaccggttcctccatggcggtcaatgccatgagctgcagcagatggttttggatgatgtcgcgcgctgcgccgatgccgtcgtagtaacctgcacggccagccacgccgatatcctcggccatggtgatttgcacatggtcaacgtaattgttgttccaaatcggctcgtacatggcgttcgcaaaacgcagcgccaatatgttctgcacggtttccttgccgaggtagtgatcgatgcggaatacgctcgacgggtcgaacacctcggaaaccacacggtcgagttccttagcgctggccagatcgtggccgaacggcttttcgatgatcacgcgacgccaagcgcctttgtcgcttttcgccagaccgcagtcggccagctggcgggagacttgcgggaaggcccgtggcggcacggacatgtagaacgcatggttgccgcgcgtgccgcgatcgcggtcaagttcctcgacggtctccgacaatcgttcgaacgccttcggatcgtcgaaggtgccctgcacgaaacgaatgccgtcggtaagctgcttccaagtcgattccttgaatggcgtacggcagtgcgcctcgacgttctcgcgtacgaaattcttgaaatgctcttcggtccaatcgcggcgggcgaagccggtcaaaccgaagcttggcggcaacaggccacggttggccagatcgtagattgcgggaagcagttttttacgggacaaatcgccagtcacaccgaaaatcacgatgctgcacggaccggcaatacggggaagtctcagatcgcgcgggtcgcgcagtggattcgtccacgcgccggccgcgttggatgcggttgaaacggtttcactcatgcctttcatactaacgcgcggactccactcgccgccaaagggaattcgaaaacgtcatggcccttttttagagcatcctacaaaacggcatggcggttccctcgtttggtgccgccactacaatgccttcgcaagcgaacgacgagccggctgcggctggcggaggcaaaaacatggtgcacaacaagcagggcatagacatgctgcacgggcgcatatggacgaaggtcctgcgattcgcgctccccgtggcggcgaccggcattctggaacaactcttcaacgcatccggcatcatgatcgtcggcaacttctcccaatccgacggcaccgccgcggtcgcggccgtcggctccaacgcgcccgtcaccggactcatcctcaacctgttcatcggcatcgctctcggcgcgaacgtcgtcatcgccaacgccatcggacgaggcagccgcgaagcggtgcgcaacgccgtgcacacgtccatcgtcaccgccctgatcggcggcgtgatcgtcgccatcatcggagaattgctcgccggaccgcttctcggcatgctcaacgtgaccgccgacgtgttccccctggcgctcgcatacctgcgcatctacctcatcggcatgcccgtcatcctgctatacaatttcgaaacagccatcttccgcagcatcggcgacacccaggctccgctcgccgtactcgccatttccggcgtgctcaacgtgaccatgggactgattttcgtcgtattgttccattggggtgtttcgggcgtcgcgacggccacagtcatcgcgaacgtcgtcagctccatgattctgctgtatcgactggttcatactgacgcagccatccatgttgatttgcgcgagttcggcatcgactggttcaccctgcgtcagattctgcgcatcggactgcccgccggcgtgcaaagcgcggtgttcgccgtggccaacatcatcatccaagccgccatcaacagtctcggcaccgttgtcatggccgcctccagcgccgcgttcaacatcgaaatcatcgcctactacgtgctcaactcgttcagccaggcctgcgccaccttcaccgggcaaaactatggagccaaacggatcggacgctgcaagcgcgtgcttggcatctgcattctggaggatttcatcgccaccgcggccaccatcgccgtcgtgctgttcttcggccatagtctgctggcgttgttcgatgcgacaccggaggtcatttccgtcggctacaccagactcgtcatggtgttctccgcctacacgttcagcatgctgtacgaggtcatgtccggatatctgcgcggcttcggcatctcactggtgccggcgctgctcaccgtaatcggcgtggtcggcgtgcgcatcacctggatcgcgttcgtgttccccgcgcatcgcacgttcgaggccatcatgatcgtctacccgatcagcctcgccgcaaccgccgtactcatcggcatcgctctgctttgctaccgtccgtccaagcgattcgccgttaaaccttaagcgtgtgcggcttgccgccgttcatgaacgcggcgattcgccgggtcagagcgcggggaagaacccgttccgcgagcgcgcccgccttggtgagcggaccatggtaggcgagggttgagccgcgcatcatcctgcggtaggcgtacgtggcaagctgacgtgcggtggccggtttggtcatggtgaagaaattgcggccactcatattcgcagccttctgaaagccggtcgtggtcggaccgggacatacgcaggtcaccgtcacgcccgtgccgcgcaattcgtgggccacggcctcggatagcgagcgcacgaatgccttcgacgcgaaatacatcgccatgtatgggcctgccatcatcgaggcgacggacgaaatattcaaaatcctgccatgcccgttggcgcgcatgtctcggccataccgatacgtcaactcagcgagcgcatgcatgttgagctgcatcatctcgttttgccggttccagtcggcgtcgagaaaatccgtccagtcagcgaagcccgcgttattgacgagatggtcgaccgcaataccttgtgatgtggtgaaatcatggagtttcttcggtgcgttggcttcgctcagatctatggcgaacgtcaccacatgcacgccaaaacgctgctcgagcttggttttcaccgtattaagccgttcctggctgcgggcggtgatcaccagatcatgtccgtccgctgcgaacagcgtcgccagttcgcgtccgatgccgccggacgctcccgtgatgagtgcgtatcccatgccgactccttcgttttggtcctatctcgcctatgaatggcggatttgcgggtctgcctgatgctatctccactatagatggcggatgtttttcgatttagaccccctgagatagcgtatgggggtaaaaagcgcggcttttcactttgccgtccgccatctataagcgagataacatgtgtcgaaagacgaaatccgccatccataggcgagataggtgttttgtggaaaggtggataacggcggtgaaaaagaagtcgcattacgattcgccgcttggcggcatcacgctgatcgccgacgaaacggcattgctcggcctgtggttcgattggcagccaggctatgcggacgatgattccgcggttttgggtgattcgccgacgattggcgccgcgaaacgatggctggaggaatactttgcaggttacatacctcggaccgaagtgccgttgcggctggaaggcacgccgttccgcaaggaagcatgggcattgctgcggaaagtgccatacggcgaaacggtttcatacggcggactcgcacgtcgattggagttgaaacgtgcggacgggcgtagggtatccgcacgcgccatcgggggagcggtgcaccacaatccgatcgcgcttatcgtgccctgccatcgggtcgtcggcgctgacggcagtctcaccggttatgcgggaggcattgaaaccaaaatccgtctgctccaactcgaaggcgtgctgaagcagacggaacggacggatgtggattgcgaatctatagaccggatttggcgatccacccgctgacggcttcggcggctttacttgcgttgttctgtgcgtcggtccccatgaccgcaagccccggcttcaccgtcgtcttggtgattgcggtgatacgttccggagtccgtccaagcccgctgccgccgtgcgtgcagaacggataaatggttttgccggaccagtcgcggctttccagaaaagcgtacatgggcatcggcatatcgccgcaccaaatcggatagccaaggaacacggtatcggacgaatcgagcgcatcgacatcgccgctgagcgtgaacagcggacgcgcgttgacacgctgctcctcctgcaccatttctgaggtcgcggcgtaccgttccggataaggctcggtacgtgtgatttcaatcatcggcgaatcggtccgccgggccacctcttgggcaagcttcgcggtattgccgaccgtcacctcgcccacttcgtagttttcgccggcgcgggagaaaaacaccaccaccatgttgcgtcctttcatggtccttgaagaggccgttgccgcatccgtcatgcgtcagtccaagggtttatcagtccatctttggaaacgattgtgctcgatacgcgagcagaccgtcgatgaaccgtgcaagaccctcgatcatgcgtgcacgcggacaggccacgttgatacgcacgaaatcatgaccgttgccaccatattcggaaccctcggagaacatcaccttatgctcgcgcttgagataatcgcacaacgcatccgtgtcatgcgtgatggccgaacagtcgacccacaacaggtaggtggcatgtccttcgaccatgatgatgcgccggtcggccggcaccgaagcgttgtatttgtcgaacatcgcacgcgcggtcgccttgttgccggccagataggctcgtaattcgttcagccacggttcgccctcattgaacgcggccagggtggcgtccatggcgaaggcgttcggctccgccacctcatcggtgttcaaagctcgccacaccttatgacgcagcaccggattcggaatcatcacggccgcggaattcagtcctgcgatgttgaacgttttggtcggagccatgcaggtcaccgaattcatcgcgcaatgctcacccaccgaggcgaacggcacgtaatcgaaacccggatcggtcagatcgcagtgaatctcatcgctgaccaccgtcacatgatgcttccagcacagttcgccgatacgttccaaagtctcacaatcccaaatacggtcgatcggattatgcgggttgcacagaatcatcagcgtggtctgcgggtcggcgagtttcgtttcgaaatcagcccaatcgatctcgtaatgtccttcgccgtcataggcgagcggcgattcaagcacacggcagccattgttgagaatcgaattgaagaagatgttgtagaccggcgtcatgatcacgacgttctcgttcggcgtggtgagtttcctgaccatgctggagatcgccggcaccacaccggtgcagaacaccagcgagtccgggtcgatggcaagcccatgacggcgtccccaccaatccacgtacgcctgattccattctggcggcacgatcgaatagccgaaaacgccatgctcgacgcgccgacgcaacgcctcgcggattacgggcgcggtctggaaatccatatccgccacccacatgggcagcgcgtcgccagcctcctcccatttgagcgagtacgtgccggaacggtcgatcggagtatcgaaatcgtaagtcataccgccaatcctacctactgttatgcggcgtcggctgtcacgatcgtcgtggccgtcggatcgattttcgccggatcgagcgtcatctcgttgatatggtcggcgcgaatcgtgccggacgaaggattgaacacgctgtcgatcgtgccgcgcacgtcggcatcgacggaggaatattcgaacgcgagcgtcgtattgacgagccggcagtcacgcaacaccagatggtccacgtagcacaggccctgcaggctttcgatcgtgcaatgctcgaacgtcacgttacgcgagttccacgccagatactcgccggaaatgaacgaatcgcgcaccgtcacgttctcacagttccagaaacaatccttcgaaatcagacgggaattggaaatctccacgttccttgcgccatcgaacggataattgcccaccaaacgtaggttgtcggctttcacatccgcgcaattcatcgccagatagtcgccatgcgcgctcacattgtccaacgtcacgccggaacaggcccacaacgtctcctcggcgttgacgaaatccacgttgcgtaacgtcacgtcatggcagcggcggaaattcttcggcgcctcgatcgtcgaatcctccaccgtgatatggtccgtgtaccatacgcccgcacgtgccatctcaaaccacgtgcagtccttcgcatcgatatccgagcaataccacagcggatacttccatttgaacgagctcgacctcagttcgatgtcatgggcatgcttcaacggcgattcgccatcgtcgaaaatcgtatcgacgtaccggcggtcatgcgcgaagaactccgcgcgctcgccggtgaggaacgcctggcgggtttcggacatgtcctgctccgcagcggatgtaaatgtatctggagtgttattcaccgtatgctccttcatgctctgttggaagagaataggaacttcaagtacttgaagtcaaacagggagccacgttcgtctggaacgaacacggctccctgcggaaaatcgggaaatgcgcgccgaaacaggcagaggaatcagccgatcagcgctgccggatacttcgccacggcggcgtcgatctgctcatcggtggacgtggcgacgccttggatgaggaacggcttcagatatgtggcatgcgtatgacggaacgtggtctcgaacggggaaagcagctcctccatggtgcgcacatggctgccttcacgcgtgtaggagtccgccggagagccggtggacacggccaacatgaactccttgccttcgagcgcccgcccgccgccgtaggcccagccggccttgatcacgtcatcctcccactgcttgagcagcgcgggggagctgtaccagtagaacgggaactgcagcacgatgcggtcatgcgtttcgatgagctcctgctcatgttcgacgttgattttgaagtcgggatatgcggcgtactcgtccaccacggtcacgtcgccggtctcgttggccgcgtccatgagcttgcggttgacctgcgatttttccagatgcgggtggaataccagtaccagtgtcttcattcatgctccttgtccaaaggtttttcgttacgttccagtatgcagcatgataatctcgtcgcgcatgctttgtacgtaatccgtcgatgtccacgcgtcgatacggttgcgcatggtttgtcggggtcggcaatagtatgttggccgtcgttgtggcgcgtcggggtatatcagggcgcggcaagagaaggcatgagaagagaagcatgggagcggacggaagaagggctgatatttaatggtgcggacgcagaacaggaacgccgtcatgggcaaggcgttcagaacggcattgccgcggacgtcgccggtctgcatcagctttttccttctggcgttgtcgtacggcgtgctgatgggcacgcgcggcttttcgttcctgtggcccatgtgcatgagcgcgttcatcttcaccggttccatggaattcgtcaccgtgaatctgctggtgtccgcgttcaacccgttcgtcacgttcatgctggccgtcatgctcggcacccgtcatctgttctacggcatctccatgctcggccggttcaagaacatgggcgccaagaagccgtatctcattttctcgttgtgcgacgagaccttcgccatcgacaacggcaccatcattgcggccgacgtcgatcgcggatggttctacttcttcgtcggcctgctcaaccagtcatcatgggtggccggcgccacgcttggcggccttctcggagaacgcatcaccttcaacacctccggtctcgacttcatcatgaccgccatgttcgccgtcattttcgtggatcaatggctgaccacgaaacgcaaaagccacatggccgcgcttaccggcatagcggtgcccgcgatctgtctgggggtgttcggcgccgacaatttcatgatcccatccctggtcgccatgctcgtcatgttcattctgctgcggccatacctggacgacctgaagatcgacaagacggacggggagaacgaaacgaacaacgcggacaaggagacgaacgcatgatgatcatgaccacgtggcaaggcgtcatcaccatcatcatggcgatgctcggcaccatgctgacacgtttcctgccgttcctgctgttccccgaatcgaaggaaccgccgcgtttcatcacctacctgggcaccgtcctgccgtatgccatgacaggcctgctcgtcgtgtactcgctcaaaggagtgcacctgacgtcaggcagccacggcattcccgaattgttggcgattatcgcaatcgccctgctgcacatatggaaaaggaacatgctgctgtcgatcgccggcggcaccgccgtctatatgctgctggtacagctggttttctcgtaagacggcttccgcctgtgcttggcattgcgattacctggcgagccccatctcgtatttgagcgtcatcacacgaatggcggattgctgcaccttccgcgcgaacgtcgcatcgccggccgctttggcgttcaatccgtccaacaccggctgcacgtaggaagaggcgccgatacatgccaaatcgccgccggcttcgaccagccgcacacccaaatcactcggctgcacgccactcaaagacgttgcggacagggaatcggaagtgacgacgccttggaagccgattttcccgcgcagatagccggtgaccagcgttgatgagaacacggccggattattcggatcgatcgcctgatatgtggccaaagacatcatcaccatcgaagggcttgcctccaacgtgccgttgaacgcgctgatttccggaccatccaacgtggtggtggtgtcgaggatgccgttcgcggtgaaatcggtattgccggtcaccgatcccaaacccggataatgtttgatggcgctgcctacccccgaatcggacatgccctgtatgaacgccttcgcatggtccgcattgccggccggatcaagaccgaaatcacggtacagcgcgccaatcggggcgttcgacgaacggtccacggtcaccgtgccgacgacgggcgccagatcgacattgatgcccgcagccttgagctgcgtgccccatgcggatgccgattgcctcaactggctgacatccattgcgccctgctgggtggccgaaggcatggtatcaaacccggcccccttgagatgctggaccagaccaccctcctgatcggtggacatcaacagctggttgtcgcccggagcatacgattgcagcgtggatgtggcggccgcgaccccggcgatccccgaattccagttgccgatgatcaagaccgaaccaacatgcctgttcgcgatgaggtcatacaacgatgacggatcggaaccagcgaacaatggcgccataaccagctgcccgacccgttcctcgacactcatggactccacggcccgcaccgccttggcatgcggcgaatcgtcgcgaacggacggcacttgcgccttgtcgagggaatcatgcgtgaccgtcggccggcgagtggaaaaagctgcggtggcggcgtccgatggggaagcgtcgccggaacatgcggccaacgtgaccggcagcatcgccacgcagcaggcagccaccaatcgtgtgaaaaacccatgagccttcttcataccgccattatggcatgccggcattccccatatgttcccttcatacggacatgccacggaacagccgattcagcccacggccagatccgttcggctggcggcttaacggcgttcctcgcctgtcgctaggctattagcatgtctttctttgatatgtttggtcccatgttcgatcccgaaggcggctcgaaccgtgccggcaggcagaatccgcgcaaacccagcaacgacgatccgatcatcctcaacgtcgaaaccgacggaggggacggtccgcaaccatcgtcgaacgttcccccgaaacgaccttcgggcccccgcatcaccagcaagccgaaccgtccgcgcaaaccgtcgaacggcagcaagatcttcatcggcgtggtgctggcgctcgccatcgtcatcggactgttcttcgcgctcgcgcagttcgtcaccgatgtcatgtggtacagccagcttggcttccaaagcgtgatttggacgcagctgggcaccagggtcggcctctggctggcgtacgcggtgctcatcgccgcagtcggcttcatctccgccacgctggcgatatgggcgcgtcccgacgctgcggacggctccaccatccgcgtgaacggcgacaccatcgaaatcggcaagagcgtgagctccaagagcgctcgacgcatcgccgtggtcatctccctgattgtcggactggtgttcggctcccagttcaacgcgaactggtccgaaatcctgctcatgttcaacgcgcaaagcttcggcaccaaggatccgcagttcggcatcgacaacggcttctacgtgttcgtgcttcccggactgaaactcatcatgtccgctgtctcgctgttgctgctcgctggcatcatcttctccatcgtcacccacgtgcttatgggcggcatccgcatcaccatgccggtgaacggccatggcctgttccacatcaccaaacgcgcccgccgccagatcggcatctggctgatgctcaacatgttcgcctgggccgccaatcaggttctgggcgtgttctcgcacctgaccgaggaaggcagcagaatcaccggtgccacctacaccacggtgaacgccaccatccccgtcacgttcatcatggccgccatcaccgccatccttggcgtgatactgggcctgtggattatgaaatcccatacgttggaaggttccgcacccatcgcggcacgtgcttccgaagcgctcaaggcgtggaaggtgccgaccgtggccatcgcctccgccatcgtggtgagcctggtgcttaccgtggcctggccggtgctgctgcagcgcttccgcgtcaatccgaacgcgcaggaaatggaatccacctatatccagcgcaacatcgacgccacccgcgccgcgtacggcttggacaaggtgaaggccgaacagtacaaggccaccaccgaaggcgaggaaggcgcattggccgattccgcggaatccaccgctcagatccgcctgctcgacccgcagatcatctccccgacgttcaaacagctgcagcagtccaagcagtactacacgttcgccgacaccgtcgcggtcgacaaatacgacgtcgacggcgtcagccaggacacggtgatcgccgcgcgcgaactcgatctggacggtctcgacaaccgcaactgggtcaacgaccacaccgtgtacacgcacggctatggcgttgtggccgcctacggcaacaaggtgaccgccgacggccagccgaagttcttcgaagcgggcatccccacccaaggcaagctcaccgattccgaaaagtacgagccgcgcatctacttctctccgaacgccgccgaatattcgatcgtaggcgctccggaaggcaccaaatcctgggaattcgactatccgaccggttcggaaggcgccaccaacaccttcaagggcgatggcggtccgaagatcggcaacatcttctccagactgctgtacgccatccgcttcggctccgaccagatcctgttctccaaccgtgtgaactccaattcgcagattctctacgaccgttccccgaaggaacgtgtggccaaagtcgcgccgtatctgacgcttgacggccgcgtatacccggccgtggtggacggacgggtcaagtggatcgtggacggctacaccacttcggacgcctacccatactctcagatgaccgacttgggcgaggccaccaaggactccaccacggaatcctccgacacggtaagcagcctgaactcgaagaacgccaactacatccgcaattccgtgaaagccaccgtggacgcatacgacggttccgtggacctgtatgtatgggaccagtccgacccggtcatcaaagcctgggagaagatcttccccggccagtaccaccagctgtcggaaatctccggcgacctgatgagccacatgcgttatccggaaagtctgttcaaggtgcagcgcgaactgctggccaaataccacgtgtccagcgccaaccagttcttctccggagaggatttctggcagacccccgtcgacccgaccgaatcgcagcaggcgcaacagcgagacatcctgcagccgccgtactatctgacgctgcagaccggcggctccagcgaaccggtgttctcgctgacctcgtcgtacattcccgcaggctcgtccaccagggaaatcctgaccggcttcctgtcggtcgattccgacgcgggccacgagaaaggcaaaatcggctcgagctacggcaccatacgattgcaggaactgccgaaggattccaacgtgccgggccccggccaggcgcagaacaacttcaacgcgtccgccgacgtgtcgaaggaactcaacctgctcgaatccggctcgaccaatgtgcagcgcggcaacctgctcaccctgcctctcggcggaggcttggtctacgtgcagccggtgtacgtcaaatcgtccggctccaccagcttcccgctgctgaagaaggtgctcgtcgcattcggcgaccaggtcggcttcgccgacacgctggacgaggctctcgaccaggtgttcggcggcgattccggcgcgtccgcaggcgacgccgaaaacgtgggcgacaccaccgatgacaagcaggatgctaagaacgacgattccgccgatggcaagaccaacactgacggcaagcaggacgcgccatccaataccgacggtaagaccggcggcaataatggcgattcgtccggcacgatgagcgccgacctgaagaaggcactcgccgatgccgcacaggccatgaaggattccgatgccgccatgaagaagggcgattggtccgcctacggcgacgctcagaagcagcttcaggaagcactgaacaaggccatcgaactcgaacagtgattcccgtccgattcccttcatgaaatacgcaggggccggctccttccaaaggaaccgtcccctgttgtcgttcgccgccgggtatgctgggcgcatggccgactattctttccgcatcgcgacgcaagacgatatccaagcgatcaccgacatctacaacgcggcagtcatccgcggcggctcgtccgccgacaccacgccacgtacctacgcgcaacgcaaggcatgggtggaatcgcaccacgatccatatgcggtgttcgtcaccaccgtgcctgccacggatgcagccacggaaggcggcgaacggatcatcggcttctccgcgctgtccgtgttctacgaccgcgccggctacgacggcgtcaccgacctcgcctactacatcgcccccgaatggcagggcaggggagcgggcaccttcacactggccaaactgcttgacgaatgccgaaaccgccacatgcgcaaagcctgcggcatcatcttcgccgacaaccgcggatccatcgcactgatgaaacatttcggattcacccaattcggactcatgccccaagccgccaccgactccaccggaaccatgcgcgacatgagctactggcatctcgacctgtaagcacctgacagtagaatctgtgcggttaaacaagacgagagcacgcaagaacacagaggaatggacgattattatggcatctgatttctggctgatcgcaggactgggcaaccccggctccaaatatgagggcacccgccacaacatgggcttcatgaccgccgacgtgctggccgaacgctggtccgtcaacttctccgaccacaagggactcgccatgctcggcaaaggcgtgatgaacctatccggccgcaacgtcaaattcttcctcgccaagccactcacctacatgaacgaatccggcaacgcggtcgcctccatcagcgcctactaccagatcgaaccggaccatatcgtggttatccacgacgacatggacctcgacttcggcagaatcaaagtcaaagccggcggctccgcaggcgggcacaacggcatcaaatccatcgaccgttcgctcggcaccccgaaatacgcgcgcgtgcgcatgggcgtcggccacgcccaacgcggagcccacgcgcacgacaacaccgtgaactgggtgctgggcggcttcggaccggaccaacgcaagcagctccccgaattcctcgccgacggtgccgacgcggccgaaaccatcatcttcgacggtctcgccaaagcccaggagcgattcaatggccgctgaaccgacgcctccggcgcaaccaccgcaactgccgaccgcaggctcgcttgccggcatcctcgacgtgctggaaaccgatgacgatttccgcgcgctcatcgccggggaaatcgaagaaccggaatcagacatcgaccccagcatcaccgtcggtgtgccggacggcctacgcccggcgctcgcagccggcgctgcgggcaaacagccggtcgtgctcgtcgtcgcctccagccgcgaagcggaggaagccgtggagtccatccgttcctggtatgacggagacccaaacgatgtggcgcagcttgaagcatgggagacccttccccatgaacggctttcaccacgcgcggacactgtggcaagccgcatggcggtgttccgcaggctgaagcatcccgaagagggcagcacgctgttcggccccatccgcattctggtcatgccggtgcgctccctcatccaaccggtggtcgcaggcttgggggacgtcgaaccactcgtgttctcccaaggcgaggaactgcctcttgacgaagcatcccgcaaactggtggaaaacgcgtacacgcgcgtcgacttggtgatggaccgtggcgaattcgccgtccgcggtggcatcatcgacgtttttccgcccactctgccgcatccggtgcgtatcgaattcttcggcgacgagatcgacaccatacgtgaattccacgcatccgaccagcgcacctacggtaaggatatttccaccgtatgggccacgccatgccgtgaactgcagttgaccgaccagattcgccaacgtgcgaaatcgctgatcggctccattcccaacgccgaggacatgctcgaatccatcgccaacgccatcccggtggaaggcatggaatcgctgctgcccgcgctggtcgacgatatggaaccggtgcagggcatgctgcccaagcatgcgctggtcatgctgtccgacccggaaaaacttcgtcgcgccgccgacgatctggcgaaaaccgccaacgaattccttgccgcaagctggcatgtcgccgcatccggacatggcgccggagcgccgatcaccttcgaccaggcgaatttctacgatttcgaggaaaccatctccgcactcgtcttctccaaacatgacgtgtggaaactcaccagcttcggcgtcgacgccacccgggaaggccacatccaacttgatgccaccaaacccggtgaataccgcggtgacgaaaacaaagcggcctccggcatcgaaggactgctcgacgccggctatgcggtgacgatcacggccgcggcccaaggcacactcacccgactgaagcgtgcgatcaacgaaaccggcatcgcgaatttcgattgcgtccgatcgcgcgccatcgacggtttcgtggacgacgccgcgaaaatcgccctgctcaccgaacgcgacctgaccggccgcacatccgccgcaggacaggcgaaaacgccgaaacgccgccgcaaggccatcgatctgatggaactcaaaacgggcgattacgtcgtgcacgaacagcatggcatcggccggttcgtcgagatgcgccaacgtaccatcggcaaaggcgagaaccagaccacccgcgaatacctggtcatcgaatacgctcccagcaaacgaggcgcgccggcggacaaactgttcatccccaccgaccagctcgaccaggtcagcaaatacatcggcgccgaaacgccgaaactcaacaagctgggcggttccgactgggccgccaccaaagccaaggcgcgcaagcatgtgcatgagatcgccgaggatctggtcaagctctactcggcacgccagcgtacgaaaggctatgccttcagcaaggacacgccgtggcagaaggagctggaggacgctttcccctatcaggagacggccgaccagctcaccaccatcgacgaggtcaagtcggatatggagaaacccattccgatggaccgtctgatctgcggcgatgtgggcttcggcaaaaccgaaatcgcggtgcgcgccgcgttcaaggcggtgcaggattccaagcaggtggccgtgctcgtgccgaccacactgctcgtgcaacagcatttcgagactttcaccgaacgtttcgaaggcttccccgtgaacgtggctgccatgagccgattccagaccaccaaggagattaacgagaccatcaaggggcttgaagacggttccgtggatgtggtcatcggcacgcacaagctgctcaatccgaagatcaagttcaaggatctgggactcgtcatcatcgacgaggaacagcgtttcggcgtcgagcacaaggagacgctcaaggcgttgcgcaccaatgtggacgtgctgagcctgtcggcaacgcctatcccgcgcacgttggaaatggctgtcaccggtatccgcgaaatgtccacgctggccacgccgccggaggatcgcctgccggtgctcacctacgtcggcgcttacgaggacgcgcaggtcaccgccgccatccggcgcgagctgttgcgtggtgggcaggtgttctacgtgcacaatcgtgtgcaggacatctcctccgtcgcggcgaaaatccacgagctcgtgcccgaatcgcatgtcggcatagcccacggcaagatgggggagaaacagcttgacggtgtgatccgcgacttctggcatcgcgacatcgacgtgctggtatgcaccaccatcatcgaaaccggccttgatatctccaacgccaacacgctgatcgtcgaccatgccgaccgcttcggcttgagccaattgcatcagctgcgtggccgcgtcggtcgtggacgtgagcgcgcgtatgcgtacttcctgtacgatccgaccaagccgatgacccagcaatcgcatgacaggctcgccaccatcgcgcagaacaccgcgctcggctctggcttcgacgtagccatgaaggatctcgaattgcgcggcaccggcaatttgctgggcgatgagcagagcggccatatcgaaggcgtcggcttcgacctgtacgtgcgtatggtgtccgaagcggtcgaacagtacaaggagccggaacgcaaggaatcggttgccgtcaccatcgacctgccgatcgaggcgtccattcccgtcgactacatcgattcggacaaactgcgattggaagcgtaccagaaactcgcctccgcacgcaccgaagacgatctcgacgagctgcgcgacgaactcaccgaccgttacggcaagccgcccgtcgatttcgaggcgctgttcgacgtggcgcggttgcggttcaaggcgcgtaagctcggcatttccgagatcatcgcgcaaggacgcaacgtgcgcgtgtcgaagttcgagccgcgtgaatccgtgcagatgcgcatggccagaatctacaaaggcatccagtaccggccgttgaccaagacgtatctggtaccggctccattcgcaggctcgcttggttccaagccgatgagctcggacgaagtggtcggatggaccagtcaattgcttgacgatctggactggaaaccgacaccgcgtcaatgacaatgggatgcaaaaaagagtgtgagcgttcacatggaacatgcgggcaaagtttggcatacgtccataaatcgcactattcttggcattgtcatcacaacctaacgtttataaggagtagttgtggcagtaattgaaagcgtttacgcgcgtcagattctcgattcccgcggcaacccgaccgtcgaggtcgttcttgacaccgatgacggtgctcagggcctgggcctcgttccgtccggtgcttccaccggcgaagccgaggcttgggagcgtcgcgatggcgacaagtccgtttaccagggcaagggtgtgctcaacgccgtcaaggccgtgaacgaggagatcgctccgaaggtcatcggcatggacgcttccgatcagcgcgctctcgatgagaccatgatcgagctcgacggcaccccgaacaagggccgtctgggcgccaacgccatcctcggcgtgtccctggccgctctgtacgcttccgccgagtccgcggatcagccgctgtaccgctacatcggcggcaccaacggccacatcctgccggtcccgaacatgaacatcatgaacggtggcgcccacgctgacttcgccaccgacatccaggagtacatgatttccccgtacggcttcaacacctacagcgaggctctgcaggctggcgtcgaggtctaccacaccctgaagaacgtcctgaagaagcagggcctgaacaccggcctcggcgacgagggcggcttcgctccgaagatgaagtccaacaaggactccctgaactacatcatggacgccatctccgccgccggctacgagccgggcaagcagattggcatctccctcgacgtggcttcctccgagttctacaacaaggagaccggcaagtaccacttcgaaggcgacgaccgtgaggccggctacatgctcgacttctacgagaacctcatcaacgagtacccgatcgtctccatcgaggatccgttccaggaagaaggctgggacgactgggcggccatcaccgccaagctcggcgatcgcctgcagttcgtcggcgacgacctgctggtcaccaacccggcacgtctggccaagggcatcaagcttggcgccgccaactccctgctggtcaagctcaaccagatcggcaccgtcaccgagaccctcgacgccatcgagctggccaccaagaacggcttcacctccatggtttcccaccgttccggcgagaccccggacaccaccatctccgacctggctgtggcaaagaacaccggccagatcaagaccggtgccccggctcgtggcgagcgtatcgccaagtacaaccgcctgctcgagattgaggaggagctcggctccaccgctcagtacgccggctacagcgctttcaaggcctgcaagaagtacatcgctgagtgagcgtagccagcgcatcatgaatgcgttgacatagaaatacccgtcgtgttccaagtcgaacgcgacgggtattttcgttgctatgagttcgaaggcacgaaaaaaaccatcacaacgcggcggcgccggcccggtcgcgttcttcgtggcattgttcatcgtggctttgggaaccatccagttggcatcgacattccatacctatgcgttgaatctggcagagcttaacggactgaaaaaacaggaagcggcgttggtcgcgcagaaacgcgagctggagaacgatatcgcaagatgggatgacaaggcgtatgtcaccgcccaggccagggatcgtttgggattcgtcttccccggcgaacaggcgattcgtgtcgagcatcccgaagcggtgaccggcaagagcgagccgaaaaaagggacgacatacgacgaatcaccgaaaaccgccctgccgtggtataaggaacttgcatattccttcaagcaggcggatcggtcggatcccgtgaaggccgattcgacgaaacagtcgcagcatgccggcgaagaagacaaacaggacagtcaacaacagactggccaatcgcaacaggacggtcagcagccgtcggaagacggacaggagtgacatggacatgacgattatcgaacaggccaagggtttggcggacaaagtgcttgcccaacccgccaccgaacatgatatcgccgtggtggagcgtcagcttggacgttacccgcgcggcatggtcgccgtcggagcccgttgcgtatgcggccggcctttggctgtggtcacccggccgttgcttccaggcggtgtcccgttcccgacgacctgctatctgaccgggcccgaagcggtgaaggccatctcccacatcgaagccgaaggcaagatgaaggaatacaacgatatgctggccgaaaacgaggatctgcgtgccggatacgaacgtgcccacgaactgtacctcgcgttccgccatgaaatcgctttggccttggaagacagcgaggaacacatcgaaggcaccagtgccggcggcatgccggtgcgtgtcaaatgcctgcatgcgttgttggcccagacgctggtgatgggtgagggcgccaaccccatcggtgatatggccctgtccgccatcaaacatgagttcgatccggccgtatgccgttgcgcagtggaaaacgaagagtagaaggtgggagtaatgaagtcggtaaccgttgccggtattgattgcggcacgaattcgattcgtctgaaagtctcgcgtgtgagcgaggacggtgtggaagacatcgttccgcgcatcctgcgggtgattcgtctcggtcaggacgtggacaaaacccatcgcttcgccgacgaggcgttggcgcgcgcctatgaggccgcccgagaattcgccggcgtgcttgccgaacatcccgtggacggcatccgcttcgtggccacatcggccacccgtgatgccgagaaccgtgaggaattcgaagacaacatcgagaagatcttgggcgtgcgtcccgaagtcattccaggcacggaggaagcggatttaagcttccttggtgccaccagcatcgtccatcgcgaggtcgaggccccctatctggtggtcgatttgggcggaggttccaccgaactggtgctgggaggcgacggcgtcacccatccgagcacgcaggtgcaggccgcgttctccatgaatatcgggtctgtccgtatgacggagcgtcatctgaaaaacgacccgccgaccgaggggcagatcgccgaggcggtcgcggatatcgacgcgcatatcgacgaggcgttcaagaccgttcccgccggcaagacccacaccatcatcggtgtgtccggaacggtcaccaccatgaccgcattggctatgggattgacggaatacgaccacaccgccgtggacggcgcacgctgcacgctggaagatgcctatgccgttgacgaccggttcctgcacatgcctcgtgaggagcgtctgacctacaagaccattcatcccggacgtgtcgatgtggtcggcggcggcgcattggtgtggaaccgtgtgcttgccaaggtgtctgaagccgcatatgaggatcatggccagcgcatcgactccttcatggccagcgagcatggtctgttggacggcatcgtgctggattacggcaagagattgcttgctgcgcgctgacgtggcataatagcttggcgtcggctttttcttctggccggcgcaaagcctccatggcgaaatcggtatacgcagtcgacttaaaatcgacctcttcggattgcgggttcgagtcccgctggaggcacttttggaaaccgccagagatggcggttttcctttattctccaacggttttggcatcatcgcgattcactgcgattcaacccttttccacggtgggttatggaaaaatgtgggcaatgtgtaggcaaaatgtggcatatcgttcccgaaacattccgtaggtacactgtcggacattacaaaccgtatgacaccgactgaaacggatgacgcatgacttcgaaagacatcaagcctgtaatcgaacagcccgccactgaaatccccctgatgcttgcgcaggcgattatcgttgccggcgtgctcgctatcggcgaaatcgcatgttctccgctgtactttaccttgatggaccattcgttggcactcgttccgtgggcattggaagccgcattccttgccgtggcgttcaccttcgttgtgggcttcgcattgttgtggtgcgccgaatcgttcactttcaaactcaaggaacgattccgcccgttcggctatgcggcggtaggattgattggatacggcgtatggagcctgctggtgttcaccgccaccatcaattcgatactcgccaaagtcggggaaagcgttcttaccaacggccaggtcggcgcgatcgcgctgaacggagcagccttgggcttcgtcgctttccttttcgcaaaactgctcgacgtcaaactcggcaatcgcaaaaccgttgcgataattctgcttatcgcggaaatcgtcattgccatcatcggcctactcatcatgattcgcatgttcagcgtgctttacgcggcgtgacggcgaagacgcggaaaagagagcgcaatatacatgttcagcattctggagatgttcaccatcggcgtcggccccagctcgtcgcacaccgtagggccgatggtcgcggccagcagattcgctgcctcccttgaacgtgacggcatactgaaccgggtcggccgcgtgcgaacggtactgtatggttcgctcgccctgaccggtcttgggcacggtaccgatcgcgccacggtggcgggcttggaaggcaacgtaccgaaaaccgtcgataccgatcacatgagcaatatccgtatggaatgcgaggcaggcggcgagctgatgctcaacggcacgcatcgcatcgatttcgattacggacgcgatgtggtgatggatgtatggcaccgcatggcggcccatcccaacggcatgcgattccaagccttcgaccggcagaacaatctcatcgacgaacaggtctggtattccattggtggtggattcgtcagacaaggcgacgccgacgacctgatgatcggcatccatgagaaaccccctgcgggaacggccttcgccgatcagaccgacgattcctcaaccgatatcgatatggacatgccctatccgttcaccacatgcgacgaactgatctcgctgtgcgatgaacatcacatgagtgtggccgatgtggtgtgggccaatgagacggccatgcggtccgccgtgcaggtgcgcagcgatttggacactgtatggcatgtgatgcgccgctgcgtgcagcacggttgcaataccaaccaaaccgttctgcctggcggccttgacgtgccccgcagggcgccaaaaatgtatgcaaggctcgcatccaacagcgacgtgctcaaacgggacggcaggcgctccgacgccgtactcgaatcatcggacgccgcatgggtcgacctgttcgcattggcggtttccgaggagaacgcggcaggcggacgcatcgtcaccgcgcctaccaacggtgcggctggcgtcattccggcggtgctccactattattggcatttcgtggatcatgcggatgaggatggtgtggtgacgttcctgctgaccgcaggggcgattggatacttgttcaaacgcaacgcgtccatttccggtgccgaagtcggatgtcaaggcgaggtcggcacagcctgttccatggccgcggcggggctgtgcgccgtgatgggcggcacgcctcaccaagtggagaatgccgcggaaatcggtatcgagcacaatctgggactgacctgcgatccggtcggtggtctggtgcagattccctgcatcgaacgcaacgccatggcgtccaataccgccatcaacgcggtccgtatggccatgctgggcgacggcacgcatatcgtgagtcttgaccaagccatcaaaaccatgaaggacaccggcgaggacatgatggccaagtacaaggagacgtcgaaaggcggtcttgcggtcaatgttgttgaatgctagcgatggatggtgctaatcttggtgacactgtgttttttcaaggaggttcaccatggcatctgaaatgcctgttgtcaatgccgaattcggcgatcgcccgaccatcgaattcccgactgagatcgctcccgccggcctgaaggtcgtggagctctttgaaggcaatggcccgatggtccgccgtggagacaccgtcaccgtcaactaccatggtgtggtctggggcaaggacaccccgttcgactccagcttcgaccgtcaccagccggccacgttcggcatcggtgtgggacaggtcatcaagggctgggatcagaccgttccgggacacaacgtcggttcccgcctggtggtgtccattccgccggagtacggttatggctcccgtggtgttccgcaggccggcatcggcggcgaggacacgctggtgttcgtgatcgacatcatctccacccgctgattgacgggtatcattcttccaaggtcaaggaggataacatggccgaagaaaagacgatcctgctgacgcaggaggcgtacgacaagatgaaagaagaactcgcctggcgtgagggcgagtaccgtgacgagattctgtccaaggtctccgcggcgcgtgccgaaggcgatttgagcgagaacggcggctatcaggctgcccgtgaggcgcagcgcgtgaatcagggacgcatcgacgaactgaccgtcaaactgcgcaatgcgaagattctgactgcgcccaaggccggtgaggtcggtgacggatccctagtgacccttgaagtcaacggacgtgaaatggtgtacgtgcttggcacgcgagacctgtccatcgccacggattacagcatcatcagtcctgaatcgccgattggcgccgccatcaatggcgctcatgccggagatacggtgacctataccgctccgaacggccgtgagatttccgtgaccatcaaggaagccaagccgctcgcctgacatacgtgtgacgaaaacaacagcccgttcctccatcgcattcgtacgatgaggggacgggcttattttgttttgtccatgtggggttgattacgccttagggccacaattgtacgatcaccatgtagatggccaccatgtggcaggcgtatcccgccacggttccggtatggaagatctcatggaagccgaacaccttcggccaggggtcgggcttgcgcagcgcatacacgatggctccggcgatatagcaggcgccgccggcacacagcagtatcaccacggtaggtccggcatagggggacatccagaacaatcccatgaacgcgacgccggacacgccgaaaataatatagacaagaacataaagccagcgaggcgcgctgatccagatgacatggatgatgagcgccaccgtggtgcagatccacatgcccgcgatgatggaatcacgccagaatggcgtgagcgcgaaggaaacgggcgtataagtgccggcgatcagcaaaaagatgttcatatggtcgatgcgacggagcacatcggtaacccgtggtgaccaatctcccagatgataacaggcggaattgccgaacagtaccagcgagcaggtcatgaacacggcgcacgcccatttgagcccggtgccatgagcgaggcagatcagcacgatgcccgcggcaagagccaggggagtggcgatggcgtggatccagccacgcaggagcggctttggcctgccatgcacgtcgagtctgattttgcgttcgatttcggcggggacgatgccttcgatttttgcggcatgggcttcgcctttggcgatggcacgtttggcttttgcatccgccttgcgtcgaatgttctcggccttattgtgcgccttcacgcgaatggtctcagctttcgcctgcagggcctgctcgcgtgcttcggcgatgaccgcgcgtttcgcctcgatttctgcgtttgtaggtttcgccatcggatgcctccactataagttacggaaccgtaacctacgttagcgtaaccgtcggatatgtcaatcggcgtttccgcattatacgtgggcatatggtatgcaacctcgccattgatgcgtattatggttgcatggctgatttctcacatatcctgatgacccgtccggatttcggtgacgacgatcgtgaatggttgcaccagttggtggccgattggcaggtgattgccgatttgagtttcgccgacttgctgctaatcctgcagaacggcgagggcaagtacatcattgccgagcaatgccgtccgtccacggtgatgagtctgagagccgaggatgtggtcggcaacgtcgtcccggaatccctgtgcgccgagcttgacgcggccatggactccgaatcggtgttccgctcctcgaaactgcgtacggtcggcaaggccaaggtttgcaacgtgtacgccccggtgcgtcataatggcaagacgcttggcttggtggtccgcgagaccaacatggccacacgcgaatcgaacggccgttatgagtccgaaagcatcagcgccggcaaacagctgtatgagatgattccgcgcggccagttcccgtaccgtaacccggttatgaaccagcgccataacgcacgtgtggcggatggcttcatcgtgctcaccgtcgacggcatcgtccgatacgcgtctccgaacgccatcagctgtttccgtcgtttgggatcggtcagcaccatgcagggggagtatctgagcgagatcggcaccaaactgctgcatgagaacgatccggtgctggaaacgctgccattggtactgagcggcaaagccgcggtggattccgaattggacgccaacaaagccgcggtgtccatgcgctctctgccgttgatggacgccaatggtcgcgtgggtggtatcgtgctgtgccgtgacgtcagcgaattgcgccgccgcgagaaggaattgcagaccaaggacgccaccatttccgagattcaccatcgtgtgaagaacaatcttcaggcggtatccgcgttgctgcgcttgcaggcgcgcaagaccaagtccgaagaggtcaaaaaggagctcaaggaagcacagcgccgcgtgcagaccatcgccatggtgcatgagggattgagccagaccgccgatgagatcgtcgactatgacaaggtcatttccaacctgcttaagatggccgtcgatttggctacgatgcgcgaccagcacatcgatgtcgatttcgtaggcaaattcggcatgatgccggcacaggatgccacgccgctatcgttggtgcttaccgaactgatcaccaattcggtggaacacggtttcgaaggacgtaaggaaggacatatcacgatttccgtgggccgcggtggcaataacctcaacgtggtggtggaggatgatggcaccggcttggcggatgaggagcatgatggcatggctcgctcttccggatcagggcttggaacacagatcatcaacacgttcgtcaccaatgattttggcggaacggtgcattgggagccacgtcgcggtggtggtacccgtgtggtgctcgacatgaaactgcgtgccgcgcaagataactgacctctagaactggaatggcatatggaagggccggtcggattccatcgaatccgaccggcccttccatatgccctgaaaagaatcagacctgcatctgcatggcctgcgagcgacgtgcacgcatcgcgcgccgcttgagcgcgcgccgctcgtcttcgctcagaccgccccaaacgccgtagtcctgattggtgtcgagcgcgcatttcagacacgcgtcaatcaccttgcaggtacggcaaacggccttggcttcttcgatttgctgataggcggcaccggtgttgccgaccgggaaaaacagttccggatccttatcccggcacgcggccttggctcgccaatcgaaagcactgctcatgtaatcgccttcctcttgctataagtggcgttctatccgttatttagataaccacgaatcggatgatttttcaagactttttcgcaaaagaagccaggtttttttagaatccttggaattccgcgcattgcacgggacatgcccgtgcttgttggatgaagaccccacgcccggcaatggcatagtcatcgacgccgaaaccgtcgagaaccgcgctgggaatccccatcatcacatcggtggctctctctccgcaaggaaacgcaacacgtgtgaggcaacgttcaagtagggtgctttgcggcttttccacagctgcgattaccgtgacggacggatcggcgagtgcggtcttgagcttatcggcttcgggcatggctgcgaaaggggagagcaattcgtcggcgtcatccacgaaccatatggtgcgttcgtgctgcggcgatattctgccgtcgtcggtggtccattcgctgttcgtcttgcgtgtgaaccggatggtgcagcgaccggattcatagagacggctggcgcagcagagcagcagattggttttgccgcttccgcatgcgccaatcacggcgatgttgccgtgtcctacgtcaaggaatgcggtggagatgagtacaccgtcgtcgctcaaagcaaaaggcacatggtgccatgcctctcgctgtggcgccgtcaaatcgtctttgcctgcatgtggtgcgagcggcgcggagaacaaaggggagggattggtggtgccgctgaatgccgatgcggtgttgatggcatgcaccaaggaatcaatgtcatggaccgcgctgcagcggaaaggaacagtgcgttgaccgtcatgacagtaagcggcaccggggaaggccggtggaatcaaagctgcatccttggtgccgatcagttcattcgattgcatttggtcggtgacgcgtaggcagatgctcagcgatatgttggccttcatatcggcatggacctgacccatgggattttgcgtgcatacgatgagatgcatacccaaagagcgtccgagcgacgccaatcgattgagtcgctgcatatagtcgggtagacggtcgcgcaatgcatggaattcgtcaatgaccaccacgagccgtgcagggggatgggaaagctggtcgaatctggaaacgcgttcggcacttaccaaggcctccctgcgtgccaattcttgttctatggcgttcagcgcacggacggcatgggcgaggtcaagatcgcagacgttgcccacggtatgcggcagacgctccaaagcgttgaaggtcgatcctcctttgaaatccagaaagacgaaatggagggtttgaggactatgccgaatcgccaatgccatgcaccaactgatcagcagttcggatttccccgagcctgtggtccccgcgaccatggcatgtggtccggatgatgccagatctatatggaatatgccatgttctgacatgccgatgccgttcgttggggaacggacaagccaattacgcacgatggtgcgccatatgagcgggtcgttgtccaggccatgcagatgctcaaaacttatggacggcatgtcggcgaaaagctgagcatggtcgatttcgtttccgttatgatgcgttggaaccggcgaatcgcttccagtaatggtgttgctgttcgtttcttcatgcctgacgcgcatgatcatggtgatgagcatcaatgcgctgccgagcagactcggagcgagcatcgccgcatagagccaatgacgttgcatacacatgacaatcagcatgatgagctgcgccagcaaaggcgcgctccaactcaatacagtgagatgttgttcgcttatacggtgaggggcctttttgttcatacggccagcatgggcaagagcggcggcatgccgcaagccaatatgagggttgtggtcggaggatgtgggttatccacatcctccggcgtgtcgtcagttttgctgttcggccagcgtgcccacggttcctgcggaatgcgtgccgtgtgagagttcggagaaaagctggatgttcttcgcgtcattcagcagaacgcacgatccgaccccatcgacgtaatagtccggatcggtccaatacacgcttcccgaaatgccatccttgcctgaggcgcttttgaaagccaacgccatccgaagcagagaggaagtcgatgctttctcatccacggttacggagctcaacgccgctgcggcgacctttttggtcttgttgaaattcgtgagcgtctgtttggaagcgcccttcttgacgatggcgttgatcacctggcgctgacgtgcggcacggccgaaatcgccttgcacatcggcatatcgcatacgggagaacgccaaagcggtgttgccgtccacggtgtggcatccggcggtccagttcatacccgaataagggtcattcacattctggtcgtagcataggtccacgcctcccaaggcatcgaccactttgacgagtccgccgaagcggaccattgccacatggttgattttctggccggtgatgtcctccacctcgttgaccaactgtttgcggctgtacagctgcgccacggcgttgatcttcatatagctcccatcgatttccaccagggaatcgcgaggaatggaaatcagcgaggacgatcctgtcttcggcttggtgagtacaagaatggtgtcggttctgaaaccttcgacgtcgccggcgtctccgatggtgccctcacgttcgtcggagccaagaataagccagctttcgccggcggtgtccgctttggatgtcagccaggtctgtttgttgagctggtcatcgacccagttccaagcggagaatacccctattcccagtgcgagaatcagtacaaggaaaatggaaaggacgatacgtccgacgcgaggtcttctttttggcacggaagccgtcgctggagaggatggaacagatcggagcgccgtggagacggaggatgacccccggaactgctgcgttggattggccgtgcgggtatgttctggagcgaaggacaccggagatgatgaagggtttcttcttgtctcgctcgttgcccgtgccgcaggctggaagctttgcggaaccgaggaagaaggacgcgccgtgcgtttggccggttttacagatgatgcatggtcagaacgtttcgccggtgcgaaactcgctggctggctcggtgcgctttgcgagcgggaggaatccgtggacggcatggtttttttgcgtcctgatgacggaatgaaacttggtggcacgctcgtaggctcttttgctcctttgccttcactcatggttcctccaaaaagattcgtccctgcgtcatacgttgaaaggggacgtgattgcgtggtctacgtcagttctttgccggaacggcacatacggtcgcattaaggtatcgatccgcaaggccgatatactggcccgtggtcgcgtcatgaatggagccgtcatccgggtcgacggtgccgccagtgcttggatcgaccaacgtgccgtcggatttggtgatcagtcccgtgacgggatcgggagtctcggcagtggtgtccgactggttgctgtcggtcgtgccggaatcgtcggagctggctgaattatctgaactggtgtcggaggagtcgcccgagtttgaatcggcggtatcgaaaatcggcttgcccgctcgcatcttctcccagagattgtcggcttcgtcggtccagacggaacggttggggtcggacggtgctgggaccacggggacggtctgggtctgcaggttggtcatggtgaaattcttcaggctcatggcaagtcccgccaaagccgcggtatcagccatgccttgggatatgttgagcgatttcagcgcggatttcgccagctggtacagctgcgcggtatcagtgaacagattcttgctgagcgcctcgctcatcagctgcttgatgagatactgctgacgtgtggtacgcgaggtgtcggatccgtctcctatgccgtgacggatccgggcgtactgcgtcgccgcaacgccgtcaagatggtgcatgcccttgtcgagattgagtccggtgtacgggtcgttgacgttctgcggaatgcacaggtccacgccgccgactgaatcaatcatcttgaccaggccggcgaagtccacgacgatgaagttctgaatattcaacccggtgagactgttcacggcgttcagcgtgcagctggccgccgaggagagatctccgccggttttgtaggcacctgcgaagatggaattgaacatgacgttatactgtgcgggaatcgtgcccttcgacgtttcgcactgaggcacgtccaccagggaatctcgtggaatggagaccaggttgatttccttgcggtcggcggagatctgcacaatcatggcggtgtcggcctgatggttgccgatgacgtcatcgaaactgcctccgatggcttggttctccgcgccgtcacgggaatcctgtccgatcagcacgaactcgatcggcttgccggagttcggatcgatgatggatgcgtccgtattcagggaaccctggccgatcacgccgaccgaattgttcttgatgatgccattgacgtccatccaagtagcggcagctgcagtgccgacgaacaccagagtcgcggcgattgccgcggcgactgcggtcctgacgtgatgctgcacgcgatatcccaggctgtgacgtggtttcgcatcctgaagaccattgatgttaggaagcttattgccggttgatgacgttgccacggtgttgccttcctgattgagatgcgcgtttgacgcaatgcttttagaacctaccactatccaaatgggcaattatagggttaatggccgattttcaccgattctgcgactgtagaccccagattgggctgaactttagcatggattttctgaaatataggcattgacacggggaaacttgacaaaattacattgcgtgtgtgtaatttgaagcggtgtgaaagtatgcgcataaaaggtgcgcacacaattatgggaggactcatgtggggcgtgactgatgagtcttctgagaatccgcttgctgaactgtggggtttgttcaagcgggatgatgacgtgtcttggcagcacaaagcgctgtgctcgcagaccgatcccgaagcattcttcccggaaaaaggcggttccaccagggatgcgaagagggtttgcgcccagtgtgaagtccgtgaacagtgtctgaaatgggccatcgaccatgatgagcgtttcggtatctggggcggtatgagcgagcgtgagcgtcgtcgctacaaaaaagagcacaaggaacgggcttgaaggcatggtgcgtcccgtgcgtacacttaaattatgaattctaacgccagcagcgatatccagacaatcgtgaccgatgtgctgaacagcagaccgtatacgcatcggcaggacgtcgatatgtccgtggctgcggtgatcaccgcgcagcatgaccttcgattcctcgcttctaccgttggagcggtgcttgcgcagcgcatgcttccaggaatgatcgttatcgccgattgcacggggcagatcgagcagcccatgcagatgaccttcgatgtcattcactcatcacaggatgtgcttacggaagtgccggaagccaaaacggtgagggtcattctggtgggagtgaagcaggcggcgtccttcatggacgctgtaacgcgtgcgatggatcagatcggcattgatgccggcatccgcgcgttgtggaccttgcatgacgattcgcggccggcggatgaccggtgcttcgagacgttgctggatgcgtggagaaacacgccgacagccgcgctgctcggtgccaagcagttggattggcaggcgaagaacctgcacaatgtgggtttgtatgccgggcaccatgatgtcgtttccttggtggtcgacggcgagcctgaccaggagcaatatgacgggcgtcaggatgtgctgtcggtctccctatcgggcgcgttggtgccgttggctacgttgcgtgcgttcgaaggggctgacccctggttcggcaccttcgcggaatccacggacctgtgccgccgcatatgtcttggcggtgggcgtgtcgtagtggttccccaggctcgcatcgcccacagaagagcccgattcgaaggaatccgttccaagaacgggcgccctgtggaagacgaggacggtcgcatcgatccgtatcttgccgtacgcgaggcgaatgccaaatacgcgtacactgacatgcaccgttcatggtggccgttgctttggctgtggtccatcatccagtcgttgggattggccgtgctttgcttggcgcgcaaacagccgtatcatgcatgctgcgagctggcgatgccgtggcgtgcgctgctgcgtctgcggggtgcttggcgcgcccatgcgcggttgcgcaggcaaagcaaggtcacgcttaaatcgctatccacgctgtctgcgaatcatcggcaggtcagggaatggctcgaccgtcgccgtgcgttgcgcgaccagagggatgtcgtgctgctcagtcctcttgagaaggaccatctgcgtaaacggttgctgcgtagatggggattggccttcggcgcggcgctgattgccggcatatggatagtcgtgctgtattgggacgtgcttcgttccgtatgttcgggtgcgtcgatgtattccgcacagctgttgcccacgggcgcgagcttcacccagttgcttcataccgcgaccacgtcatggtcgtatgcctcaggcacgggcatcagtgcgcctaacgcgccatggctgttggtgcttgcgctggcgtcggtgctcactggtggacatgttgccggagctgtcggactgatgttcttccttgcagccccgctcacggtgttttccttctgggcgctggccggcatcttcacccgctcggatgcggtgcgctgcgtggtcgcgttggcgtggttcgcgttggcgttgtccatgggactttatgatgacgcggatgtcacgatgctgacggtcatggtgtttcttccggccgctttcgccttctcgttccgtgcggtcggcatgtatcggacggaggatctggtcaatccccacgcgtcggtccaggcggcggcggttgcggcgctgtgtttcattccggtcgtcgccgcgcagccgcagttgttgctgccgctgatgctcaccttcctgggattcctgctgttcgtccgctcccataagcccgcgttgcttctgattccgcttccggcggcgttcgtatgcgcgccgacgttggtcaatgccgttcgtttcgcttccgacggtacatggcgtcagctgttcggcagcgtcatgctgccctcctccgcgcatgatggcaaaccggtcgtcgcgaatctgtctgatctgttgctgcgggtgttcggcatcggcgccgacggtggcgcatggcggtatgtggcggtttccatactggcgttgatcgtattgctggccgcggtgtcattggtgttgcctttcgtgctgcgcgtgtcccgtatgatgtgggtcgccgtgttcgcgggattggcgacggccttgctgtccgcggcgattgcggtggccgtcgatgtggatggtccggtctccggttccatgcttccgggaaccacatatgcgatgatgggcttgctcgcctgcatctgcatgatgtcgggcggcgcggttcgacgtttcgtcatgctgagacagcatgagaagaccggcgccgtcgaaatcgaaggacgcggctcgaaggcagtgtcgattgcctcgcatgtgggtcgtgccgtattggtttgcctgttggccgtctccgtcgtggcctgtgcgggattcaactatgtcgaatgcgatcacagccaggtaaagaccagcgatgctggactgccgatggtggcgaccgatttccttgggcaggatgatgcacgtcgcgtgcttgccttgcgtgccgatagcgccgaatcggtcagctacagtgtgatgcgtaccggtcgtggcgacttgattgacagctctcccgcgcaacgcgtcgaagtggtttcgggacgttccgacgggtccagcagaaccattgcgcaggattgcgcccagttgctggccaatgccgattccgatgccatcaacgagcttggcaagttgggcttcggcggcatttacgttatcaagcagaacggcgacaaagcgcagcgagaggcctcgaaccagctcaattcgaacattggagcctctgacgggacacagaatgtcgtcagtctggataatggcacgtattatcgtttgacggttcaggatctatccaagcagcatatcgatcgaagcgggcttgataaggccggctcaagtgtgtggcgtcgttcatggctgtggtgcatgggcgtcgttcttgtagcgtattgcctggtggcgcttccgcgcattcgtcgtcagggtctggaggaagcatgagcagacattctcgtcccaatacgcctttgcgtattgcgcttgccgtaatctcggtgttgctcatcgtggtcctgatggccgtgacgctcatataccggccatcatggctgcatgcggacacgcccacggtggaacgctcctcggtgggtcgtaccgtcagcccccggcagcggcagacgtactgcccgtctcgcatgaccattgccgataccgatgcctatggagatagcgaataccaggcatccaacggcaatatcgcgtcttccgcgagatacgccgccttcggttcggtgttccattcatccgtcgcctcgatgggagccgacatgacggcatccgtgtcgatgctggacaaaaaagacgactcgtccgatgacatctttgtggcttccggcaatgtcgatgacggctcccgattgcaagacacgcgtctgctgacggcttcgaacggtaccggcgcggtttcctcagtgatgtcatgggccacggacggtgatttgaagggcgtatcagcagcctcctgcgtcgtgccggcgctgaaacaggcgttcctgctttccggtacgaagaccggcttgacgcaacagcttgttgtggccaatccctccgccaaggacacatcggtgaccatcagaatctggggctccgacaaatccggcgcgctggcgctctccaccggatcgacgctgaccgtggcctcaggcaaggaaacggtactgaatctttccgcagctgcttccggccaagacgcgctgtatgccacggtgactggaacggacactcctgtggccgcaatcgtccgcaccgtctccatggacggattgacctcaaagggatcggattacgcgcttccgaataacgctttcgcgaaatctctggccctctacggcttgaatggcggagaccatgcgacactgtacctgtatacgtcccgcaaaacggatgtcaccgtatcctggatcgactccaagggggcacagcagaccaatcagcaggagctgaaggcgaaccgcgcgtccgccatcgatcttggagacgttccaaaatccgctaccggcatcgccatagccgcttccgaaccggtgtctgccacggcgaagatttcagacgatggccccgatgggcagtccgatttcgccctagtcaatgcgtccgctccggcgaagatctccgccatcgcggttcctgaccaatccaccgcgacggtaggcttcgtcaacaccgcggatggggatcggaccgcgatcgtgacggcttacgacacggacggcaaacaagtggacaggcgtgaaatcgccatccgtccctcggcctcgacgtcggtgcgcatcgccgatattaatgatggcgatgtcgccgccatccgtttgaaggatcccgcccaagccgtggtctggaatcttcgtgtcggacagaaagatgtgtccggtgcgaaactcgccggacttgccatcatcggcgccgtcgatttgaaggaggccagagagcaggtctgggcgaatcaggatatgactgttgtccgttgaaagtcacatgccccaatcaggatctatttcttccggacggcgtccgtagatttccgccagacgtgagaccacctcgtccctgattgcgaattgcaggtccatacggttacgggcatgcgattgcagcggcatgcggtacagcacgatacggggtggaatgccgtgcccggcgggaaatgactgcgatccaagatgcggaacgtcctcccaaggcgcgggatcggatggcggaacatcctccacagcgaattggaccggagctatgagctcaggccatgccccgttgagtctgcggatttgcgccaccagcatatcgtcgaacataccgcttctggtacggtaccggggcagtctggtaccaaacatgggcgtacgcgtgccacgtccatggcggttgcggtatatcggggtctcccaaggcatctgttgcatggtttctaccttatcagggcttattcgaaacatgcgataccatggtatgggctgctcgacaaggggagaaatgatcatggcggatatttccgtaccttattggaacatcgttgatgtcaacatgctgtgcgaaggcgcgcggctgattgggtttgacctcgacaacacgttggcgcggtccaagaaacctatgaaagcggacatggccgaatgcttctctgcattgacatcattgattgacgtcgcggtgatcaccggcggcaaatactcgttgctgcaaagtcaggtggtggacaggctgtccgaccatgccgacaagtcgaaacttcacctcatgccgaccagcggaacccgctactaccggtgggacgggcaacggtgggggaaagtgttctcccacgatctaagcgacgaggaccgtgccaaggcgaaggaatcgctggaacggaatgctcgtgagcaaggcatttgggccactcatgtctggggcgagcgcatcgaggacagaggcagtcagatcaccttttccgcattggggcagcttgcccccgtcgaggccaaggaggcttgggaccccaccaacgagaagaagaaccgattggcctgtgcggttgctgccgaactaccgaatcttgaagtaaaacctggaggctccagcagtgttgatatctcgcagcgtggcgtcgataagtcgttcgccgtccgtgaactcgcggatattctcgatatcgaggtcggccagatcgtgttcatcggagaccggatggaacccgacggcaatgattatcccgcggcgaaggccggcacaagggctgtcaaagtgaacggtcccgcggataccgtgaaattatgcggcgagatcattgccagattgtcccgatgacggagccggcgtgaatctgatggcgggttcattcgcgcatatggcgaatctgttgttcccacgaggctgtgcgggatgcgacaagcctgatgacgtgttgtgcgatgcctgtcttgcgtcattcgactgcgaactgtcccaaccattggaaacggctgagatgggtcgatggttcgcgtgcggatggtatcggggtgccgccagacagtcgattctggcatggaaagaccacggagacgaggaatgcgaccgtccgttctcggatgcgttgtgcaggcttgcggaacgcgccggtgtgattgacgccatggatggcgttcgtgagatctgcgataccatactggtcgttcccgcgtcgtcgtcgattgcttccatgcgtcagcgcggacgacggcacatgatgccgctggcaaaacggttgtcggcgtttctacggtgccggacaggtttccgcgtacaggtatgcgatgcgttgacgaacaaaggaatcaaaggcaaatccgtcgagaccaagggcacggaacagagggcgcaacgccttaaggggcatgtcatggttcgtccgggcgtcacccttcaaaacaaggcggtgattctggtggatgacatcgtcacctctggagccaccatgcgtcgttgtgttgacgctctaacttcacagggagctttggtcattaccgtgctggcgttggcacacactccggccggcagacctttgacggcgtaaatcgtcactcgtcatcggaaatgtgatatttcggcaaagtgatttcgaaatcggcgccgcgcggatcatccaccactcgtaccgtgccgccatgcaactgcgccgcccatcgggcgattgacagtccaagaccggttcctcccgattcggtacctggtcccgtcttgcctttgacgaatcgacggaagatatcggaccgcgcttcttggggaatctgcgagccgaagttgacgacattcgtcacaatcgtgccgaaatccttgttttcatgcgcttcgatgagcaccgcggtattgtctgcggagtgtttgagcgcattggcgatgatattggtgaacaactggcgcagacgatcctgatcgccttccatttcgatgtcgtcgggcacgtggatttcgatattgtgggcatgcccggcatcggcgatttccaacggttccacggtttcgtcgatgaaatccgcgaaattgaatttatcgatctgcaggctcgccgcaccggcttccatgcgggacaaatcaagcagaaacgcgatcagatccgacaaacggtgcgtttggttgagaatgctttccagattcgatggggtcggttccacaacgccgtcggccatgttctcgaccatggcctgcaacgcggatacaggcgtacgtagctcgtggctcacattggccaccatgtcccgtctcatctggtcggcatgctgcagttcctccgccatctcattgaaagacaaagccagctgtccgacctcgtcgcggctgttggcatcgacatgcacccggacggtgtagtcgccgtccgccatagcctccgcggcatctcgcatctcgcgcaggggagaggtgagtcctctagagaagaaataggtgatgcccaaagccacggcaagggtgatcggcatggctatccacaggctcaatccgactttgagcaggaaccaagccatgatgaatgcgatgatggtggaaatggtgatcagcacgctcaattccattttgagcgaagagaacaaaccaatagggcgttcggtatccaacggattgaccgaacgccctggttttgaatcagtggtacgcataccaccaaatcttagcgcatcatactattcttccggcggctcgaacgcgtagcctacgccatgcacggttcgaatggtcttcgaacccagcttgtgacgtagcgccttgacatgcgaatccacagtacgggtgccggacgcatccacccaatcccacacttcctcgagcagcttctcgcgagtgagcacggacttcggcttgcgggccaaagtggccagcaaatcaaattccgttggggtcaaatgcacctgctccccattgacggtgacgatacgctgggccggatcgatgaccagagagccgaaatcaagcagtttctcgttttcggagttcttggcgatgaccttcgccctgtccacacgacgaagtagcgccttgcaccgggcgatgagctcgcgcatggagaacggcttggtcatgtaatcgtcggctccggcaccaagaccgatgaccttgtcggcctcgtcgtctcgcgccgtcagaatcagcacaggcacaggacgttcagccacgatgcgcttggtggcctcaagaccatccatcacgggcagcatgatatccatgatgaccagatccggacggagcgtggaagcggcctggacggcgctggcgccgtcggaagccacgcgcgcggtccaaccctccgcagtgatgcgctgcgcgatggcggtggccaaggtcggttcatcttcgaccaccagaacggtacgtggaattactgtggattgtgctgatgaattgagcatagcgttccgcctttctcagagttccggcttcaagaatactgctcccagtgccggaacggtgattttcgcggaccaatcacgggaatgatactcacccttgaccgccttgaaggtgccgttgtgaatatcggaaccgccgtacttcttatcgtccgtggtcagcacttcggtccacttgccgcccttggtgagcggaacctggtaatcctcccatgcctcgcccgagaagttcacgacaacgaccatctgctcgccatccttgccgatacgcacgaagctgagcgtgttatggtcggcgtcatcgctggtcagccattggaatccggcaggatcgaagtcctggctccacaatgcgggagacgccttgtacagggtgttcaggtcggcgacgagcttctgcacgccacggtggtcaggccaattgagagcatcccaatccaccgaaccgtcatgatcccattcgccgtactgcgccacctcattgcccatgaaggagagctttttgcccggatgggcccactggtaggcgaacagcgcgcgcacgccggcatagcgctgccagtcatcgcccggcatcttgccgaacagcgagcccttgccgtacacgacctcgtcgtggctgatcggcagcacataatgctccgagtatgcgtacaccatggagaaggtgatctcgttgtggtgccacttacggttgatcggctcctcgtgcagatactgcagggtgtcgtgcatccaacccatgttccacttgaggccgaagcccaaaccgccggcatcggtcggtgcggtgatgccgggatacgcggtggattcctcggcgatcatcatgatgcccggattgttcttgtacgcggtcgccgtggcttccttgaggaagtcgatggcctcgaggttctctcgtccaccgtagatgttcggatgccactggcccggcttgcggctgtaatccaagtacagcatcgaggagaccgcgtccacgcgcagcgcgtcgatatggtactcgtccagccagaagcaggcgttggccaccaggaagttgcgcacttcgcggcgtccgaaattgaacacataggtgccccaatccggatgctcgccacgggtcgggtccggatcctcgtacagaggcgtgccatcgaatctgccaagggcgaacgcgtccttcgggaaatgcgccggaacccagtccatgattacgccgatgccggcctcgtgcatcttctcgacgagatacttgaagtcgtcagggccgccaaggcgcgaatcaatcgcgtaatagccggttacctgataaccccacgagccggagaagggatgctcggccagcggcatgaattccacatgggtgaaaccttccttctggacgtaggggaccagcttgtcggccagttcgcgatagttcttcacatccttgcgccagctagaggcatggacctcgtagatgctgaccggaccgttgtgcgggtcggtcttggctcgctggtccatccagttctcgtcatgccacgcatggacggagtcgacgacgatggaaccggtgcgcggcggaatctcatgcgaacgctccatcggatcggccttcatgacccattcgttgttggcgttgaggatctcatacttgtaaatcgttcccgcttcgacaccaggaatgaatagctcccagactccagaggagcccagttcacgcatggcgtgggtgcgtccgttccagccgttgaaatctcccaccacacgtaccgcatgggcattcggagcccacacggtgaatgcggtgcccgccagctgttcgcccttgacgccgtcattggagcccaacggatcgtcatagcgcagcacgcgcgctcccaaagcctcccaaaggcgctcatggcgtccctcgccaaacaggtacatgtccaaatcgccgatggtgggcagataacggtacgggtcgtcggacaccacggtggaaccgtcttcatattcggtgctgatgcgataatcgggcacgtcgaagccgtcatcggtcttgatggccggaatgagtgccatgaaaacgccattgtgttcatgcaccgcctgggttcgggcattttcggtgatgatcgtcacggatttcgccaacggacgaagcacgcggatcgtgacgacatcctcatgctcgtcgggaccgagatgcccgccgagcacctcgtgtggattgtagaacgtaccgttgcttactgcatccaggtcgccctgtgcaacaggaacggcaacgctatcttctttgatcttggattctgtagccatgggaaaagtgtaagcatgaaatgcttgaaaattggcccgtgtcgcgtctttttttggttttttggcggatttttaggcaagtccaaccctgatggcacaataattcgggttttgtgtaagcttttcacggaggattcatgggttacaaggtcggcgacatggtcgtctatccgcgtcacggcgcagcgaaggtggaggccatcaccgagcgaacggtcaagggtgtgacccgagaatatctgcagctgtcggtgctgtcgtccgacgggctggtcatcaatgttccggtggagaacgccaagaaagtgggtgtccgagacatcgtcggcgccaaggaggtcgcgaaggtcttcgagattctgcgtactccgatcatcgaaaaggaaatgaactggtcccgccggtacaagctgaacgttgagaagatcgccaccggcgatgtgaataaaatcgccgaagtcgtgcgagacctcgcccagcgtgatgtcgacgagcatgggctgtccgccggtgagaagcgcatgctcaccaaggctcgcagcatcctgacttccgagatcgcgttgtcggagcatcttgatgagaatgaggcccagcgtctgcttgacgtgaaccttggttatgaaccgccgcgccctggcgacgaggatcatcacaccgaagctcctgaagaggcggccatggacactttggcgcgcgtcgaggcggagaacaagaagtccaagaagaagtaagggaatttccatgcgtatcggtcagggatttgacgcccatcgattcgcgtcccatgatgcaggcaagccgttatggcttgcctgtttgcgttgggatggtgacggcatcgaaggtgattcggacggtgatgtcgcagcccatgcgttgattgacgcgttgctttccgcagccggattgggtgatataggcatgcttttcggagtcggttccgattccgccggtgccggcaagcacggcgacgagatgctccgcgcgacggttgcgtatttgcgtgcgcatggcatgaggccggtgagcgcaagcgtggtcgtcgtggccaatcgtccgaaaatcggcaagcgtcgtgacgaggcgcaacaggcgttgagccatgccatcggctgtgaagtgtcgctgacggccaccactaccgacggcatgggattcaccggttcgggcgagggcatcgcggccatcgccagcgccttggtggaaccgatcggctgatactttcgctacctgcggcgtgccgattcgattattttggcgacaatccagaacagtgtggaaatcgtcacgatgatgaagcttgggggagcggggaacatggcggaaaccaacagtccaccccaaatggagatcaaacagatcacggtggagacgaccatcgcggcgaatggggaccgtgagatgatgttcgcagtcgcggcgggcgtgaccacaagagcgaatatcagcaatgtgcccacggcgggcaccgcgatggtgatcacaccggccataatggccatgaagcagatgttcatgagattcaccggcacgccttttgcctgcgccacctgttcatcaagcgagctgaacagcagcggtcgatagataacggccaaaacggccagcaacaacacgtcgaaaaccgcaaatccgacgatctgcccgtccgtgatcgtcaggatggagccgaaaagaatcgattgcatctgctgcgaggcggaactggacaagcgtgcgaaaaacagacccatgcctgtggcgaacgccaatacggttcctgtggcgatttcgcgttgcgatgcctttttgcccagtgcgccgatcaccaatgctccgccgagagcgaacacgccgagaccggcactgaccggcagacccaacagcacggctccggtcgctcctggcagtccgatgtgcgccagcgcatgcgcggcgaacgtggaatgacgggcgatggtgaagtaacccatcactccagcagccaaggcgatgcacaggccggcgaggaaagcgtttgtcatgaatggcgcggtcagcgtgcccatccaatccggatcgaaggagaaagcggtttcgttcatgatcatgcctcctgcgaaatgcggttgtgttggtggaatcttgcgatttcctccggcgcgtgggcgtcgacgtcaatgtcatcgggctcatcctcgcttggagtgacgaacatatctccttggggagtggtgaccacctgcaccgtggtgccatatagatgggtgagcagcttcgaatccagcacctcgttcatcttcgcataatgcggatgcccgtcgagcagatatacggctccggtgagaatcggcagaagcatgttcaaatcgtgcgccactacttgaatggacatgccgagttctcggttgagtttggcgagcacgtgcactgtggcgcgttggctggccagatcaagattggcgagcggttcatccaacatgagtagttgggggtccgacaccagcgcttgggcgatggcgacgcgttgccgcaggcctcctgagagttccgacagccggtatctcgccttgtcctgcatgccgacgaattccagcgcattgcgtactttgtctttttgcaggcgggtgatgggatgaatgccgaaccttgccccggtcaggccaagcagcaccgactgttcggcggtgatgttcgattcgatgtcggatgcgtagctctgcggcacataccctatacggtgattcatggcgccggccggcttgccgagcacggttatgccgccgtgggcgatgggaatcaatccgagttcggccttcatcatggtggttttcccggctccgttggtgccgacgatggctgtcaccgagccttgcgggatacggaaggtgccatgctgccagatgatgtgtccgccgcgtgagacccctgcgtcgtcgaattcgatacagaatgatgccttgtcgtgcatggctcgctcccttgataagtcaacgatagtattctcacaaacggtgttgacaatcattctcaataagaagcatgcatggacgatgaaaagtctcgtgatgaatccgcctggatcgtaaccgttgctggaaaaaagagtccgccgatgtcggggaattactcgacatcggcgaatcgggggagggaggatgaccgtggctttatttaccggggtccgtctgccctgtgttgtccggcgttgcggcgtcggaatcggagtcgggattgtcgttcgacggctgctcgccattcgattcagagggagagacgtccgaatctgatgatgtcgcatcatctttggaggaaaccgcctcattcatttgcttgatgagctgcgcgatccatgaaatcaggcttttgctgtcggccggcatctgttccgtgacgtcgatgaccggcacatcggatttgtgtgcggtgccggtcagaatatttgtggcatcatccgccttctgaacattgttgatcagcatatccacttgatgcccctccagaatcttctggaagtcctggagttccttggacgagggttgcgagccttccgagatggactgcgtgtagctttcgggagtcttatcggataggcccatgtcgctgagcagataatatgcgaccggctcggtggctgcgtaggagacgttcctatgtgtatcggagaactctttcatgcttctctcgattaccgtctcgcgtctgttccacgccttgagtttgtttgtgaagtatttcttttgcttgggcatgatgcggctgtaggtgtcggcaagctccttcgccatggcgttgcgtgcgtcgctggagaaccagagatggggattgtctccctcaacggctccgaccatttgcgcggccgaaacggaaacggtgtctctttccaggttttttgtggcccaggagtcgtatcccgctccgttggacacgacgacctgtgccttctgcagggtgtcgacagcagtggtcttcggttcgaacgtgtgggcgtcctctgttgtggaggacagaatcgaggtgactttgacgtgcacgccgccgatctgctccgccaaagccccccactggttgaccgacgccaccacgttgatcggggtggtctgctcctttggtgtgtcgggtgccgttggttgatcgggctccgaagaagcgccaaagcaggaagcggtgcccagcaccgtgcacaatgtgattcccgcggcaaggatgcggaaaaatggacgctggtgagagcgcatgtcgattgccttcctcttgggtcgtccgtcgtttcggtcgcgtccatctcatatagcacatgcgcgacttacgactgaaaccaagatagcctacgatacttgcaaatgccaatacgacaagcgacttagcgaggaagtggaccacatgggaacaaggattgatggcaaaaaggtggcggcacggaccaaggcggacctcgccaaacgcgtggaactgctgaaggcgaggggaatccaacctgggttgggtaccattttggtcggatcagaccccggctccgtgaaatatgtcgccggcaaacatgccgattgcgccgaaatcggcgtgaattccatcaagcgcgagctgcctgagaatgcgacgttcgatcaggtcgccgatgcagtccgccagctcaatgcggatcccgcctgtaccggatatatcgtgcagttgcccttgccaaggggaatcgacgagaacgccatcatcgatctgatcgatcccaagaaggacgccgacgggatgcatccgtgtaatctcggcgaacttgtgctgcatgcccgaggagacatcaccacgccgttgccatgcacgcctcgcggcgtgatcgagctgttgcgcgcctacgacatcgatttggacggcaaggaggtgtgcgtgctgggccgtggcatcaccatcggccgcaccatcggtctgttgttgactcgtaaggcggtcaacgccaccgtcacgctgtgccatacgggaaccaaggatgtgcgtgaccacatgcgacgggccgatgtgatcgtcgcagccatgggagtggctggtttcgtcaagccggaagacatcaaggaagggtcgattctcgtcgacgtcggagtatcccgcgtgttcgacgaggaatccggccgatacaaggtcaagggtgatgtcgataaagcctgttacgagaaggctttggcatacacgccgaatcctggaggcgtagggccgatgacgcgtgccatgctgctgcagaatgtcgtggagatggccgaacgtcagttgtgagtttcgcgatagtgctttcgggcgtgtcgtgacatgcgacacgcccgatttttgtgcatggcttcttgtagactttcgccttgtgtgtatttgcgcacacgtataactgaagaacgattttatccatccactattttgtaagaaaccacattaatggcagagaacaataacgaagtcgccaaggtcgccatcaacgacatcggcaccgaagaggacttcatcaaggcagtcgattccaccatcaagaacttcgatgatggtgatctggtcgaaggtaccgtcgtcaaggtcgatcatgacgaggtcctgctcgacatcggctacaagaccgagggcgtcatcccctcccgcgagctttccatcaagaaggacgttgatcctgacgaagtcgtcgaggtcggcgacaccattgaggcccttgtcgtcaccaaggaagacaaggaaggccgtctgattctgtccaagaagcgtgcgcagtacgagcgcgcttggggcgacatcgagaagatcaaggaagccgatggcgttgtcgaaggcactgtcatcgaagctgtcaagggtggcctcatcgtcgacatcggtctgcgtggcttcctgccggcatctctcgtcgagatgcgtcgtgtccgcgatctgtccccgtacatcggccagaagatcaaggccaagatcctcgagctcgacaagaaccgcaacaacgtggtcctctcccgtcgccagtacctcgaggagacccagtccgaagtgcgcgagaccttcctgtcccagcttaagaagggccagatccgtgaaggcgtcgtgtcctccatcgtcaacttcggcgcgttcgtcgatctgggcggtgttgacggcctgatccacgtttccgagctgtcttggaagcacatcgatcacccgtccgaggtcgtcaaggtcggagacaaggtcaccgtcgaggtgcttgacgttgatctcgatcgtgagcgtatctccctatccctcaaggccacccaggaagatccgtggcagcgcttcgcccgcacccacgttcctggccagattgtcaagggcaaggtcaccaagatcgttcagttcggtgtcttcatctccgtcgaagacggcatcgaaggcctcgtgcatatctccgagctggccaaccgccacgtggagaacccggagaccgtcgtcaagccgggcgaggaagtcttcgtcaaggtgattgacgtcgatctcgaccgtcgccgcatctccctgtccctcaagcaggccaacgactccgttgatccggcttccgaggacttcgatccggctctgtacggcatgccggcagagtacgacgagcagggcaactacaagtatccggaaggcttcgacccggcaaccaacgagtggatcgctggttacgagaagcagcgtgaggagtgggagtcccagtacgccaccgctcacgatctgtgggagcagcacaaggaattcgttgccaaggaactcgagaacgccgaggcttccgcagccgaagacggccaggctccgaaggaagagaaggtcgaagaggtgtccaactactcctccgacaacacctccaacggcaccctcgccgattccgaccagctcgccgctctgcgcgaccagctgctcggcaagtgagtttcgacgaatcaaaataaactgattcgcgtaaaccgctgataaatggccccgcacctgatggtgtggggccatttgcgtatgttgcgagtccgtcaaacattacaatggcggttgtgatgattcgaattgggttgaccggaggcatcgccgccggcaaaagcaccgtcgctacgcatctgcgtgaactgggcgcgacgcttgtcgattatgatgtgctcgcccgaaaagtcgtggaacccggaagcgtgggcctgcaacgaatcatggaacatttcgggccggatgcgatgaacacgcaaggtggtcttaatcggcgatggatgtccgaacacgtcttctccgatccgaatgccgaatccgaacgtagaatccttgacgatatcgaacatccgttgatctacgatcttgcattgtcggaggaacggcaggcggtcgaaaagaatccggatgccgtggtcgtacatgatattccgcttttggcggaagtaatcgatgacatacccatgcgtttcgaccatatcgtaacagtcgaagcaccggaacagacgcgtgtggaacgtatgatgcgcacccgtggcatgagcgaggcacaggcgaaggcacgtatcgcgcatcagcccacgcgtgcggcacgagaatccatagccgatgcggtgattgactcatcccaggatgtagaacacatgttcgactgtgttgataggctgatggaacagtggcgtaaggaagcgagacggaaccatgggattcaacattgaacgagtgaacaagccgtttgtggtcaaatctccatataagccttcaggcgaccagccgaaggccatcgaggagctggccacgcgcatcgagaatggcgagaacgacgtggtgctcatgggcgccaccggcaccggcaaaaccgccactacagcgtggctgatcgaacgtctgcagcgaccgacgcttatcatcgagccgaacaagacgctcgccgcgcagttgtgcgccgaattccgcgaactcatgccggacaatgcggtgagctacttcgtttcctactacgactactaccagccggaagcgtacattccccagaccgacacctacatcgagaaggattccaacatcaacgacgatgtggagcgattgcgccacgccgccaccgcgaaccttctgacccgtcgcgattgcgtggtcgtggccaccgtctcctgcatctacggtttgggaacgccggaagaatacgctggccgtatgctgttcctccaggaaggccagcagatcgaccgtgacgatttactgcgcaaattcgtggacatgcaatacaagcgcaacgacatcgccttcacgcgaggcacattccgcgtgcgcggcgacaccgttgagatcatccccgtatacgaggaactggccatccgcatcgaattcttcggcgacgaaatcgaccgcatctccactctgcatccgctgaccggcgacgtgatcgcgcacgaatcgcaggtgcacatcttcccggcctcgcattacgttgccggaccggaacgtatggaacgggcgctcaaaaccatccaacaggaacttgacgagcgtaccgccgaattgcataagcaaggcaaggaacttgaagcgcagcgtctcaccatgcgcaccacatacgatctggaaatgctctcgcaggtcggcacatgctccggcgtggagaactattcgcggcatttcgacggacgcgcgccgggcacgcctccgcacacgctgcttgactttttccccgatgatttcctgctcgtcatcgacgaatcacatgtcaccgtgccgcagatcggtgccatgtacgaaggcgacgcgagccgcaaacgcacgctggtcgaacacggtttccgcctgccgtcggcaatggacaatcgaccgctcaaatggccggagttccaggaacgcgtcggtcagacggtgtacctgtcggcaacgcccggcgattacgaactcggtttgagcgacggcgtggtcgaacagatcatacgtccgaccggactagtcgatccgcagatcgacgtgcggccggtggaagggcagatcgatgacctgctcgccgaaatcaaagaccgcgtggcaaggaacgaacgtgcgctggtcaccacgctcactaagaaaatggccgaggatctgaccgactatctgctggaacgcggcatcaaagtcgaatatctgcattccgatgtggacaccttgcgtcgtgtcgaactgctgcgtgaactgcgtgaaggcaagatcgacgtcatcgtcggcatcaacctgctacgagagggcctcgatctgccggaagtgtcattggtcgcaatcctcgacgcggataaggaaggcttcctgcgttcctaccgttcgctcatccagaccatcggccgtgcggcgcgaaacgtgtccggcaccgtcgtcatgtatgcggacgacatcaccgaagccatgcgcaaggccatcgacgagaccaaccgccgccgtgacatccagatcgcctacaataaggaacatggcatcgatccgaagccgctcatcaagaagatctccgatgtcaacgacatgctcgccaaggaggacgtcgacacccagacattgctcggtaccggataccgaaacgcggacaaagccggcaattcgcatctcggcgtgccacataccagcaaggaggaatccggcaggcggcacgaggagattctcaaggccggattgcccgcacaggatctagctgatctcattcgacaactgtccgagcagatgcataccgccgcagaacaactgcaattcgagcttgcggctcgtctgcgtgacgagatccgtgacctgaaaaaggaacttcggcagatgacggaggcgagcaaatagttctcgaccggtcatacggcatccgtaccatagtggattatggctgaaacaccacttgtttttgaaatcgccacgtttgcggtgcttgccgtcttcttcgtggtggacctgttcatcatcgggcgcaagccgcatgtgccctccaccaaggaatgcgtgcagcatatcgcgttcttcgtggtcatggcgttgatcttcggcggactcatgtggttcttcgccggctcgaagcctgccatcgagttctactcaggttggctgaccgaatattcgctgagcatagacaacctgttcgtgtttgtcattatcatgtcgaatttcgcggtgccgaaggaactacagaaattcgtgctgtcagtcggcatcaccgtcgcgctcgtactgcgaggcatgttcattttggtgggcgctgccatcatctcgcgcttcacttgggtgttcttcctattcggcgcgttcctcatcgtcacggccatcaaactcgtcgccgggggagacgaggacgaggaataccatgagaacgcgttgattcacgcactgcgcaaggtcatcaagatcaccgatgaatacgacggcgaaaagctgcgtactatcaagaacggtgtgaagcattggaccccgatgctcatcgtgttcctgaccatcggcaccaccgacgtgatgttcgctttcgattcgatccccgccattttcggcctgaccaaagatccgttcatcgtgttcacgtccaacgtgttcgcattgctcggtctgcagcagctgtacttcctgctcggagagctgcttgacaagctcgtctatcttccgctgggcctgtccgtggtgctgggcttcatcggcgtcaaactcatcatggaggccctgcatggcaattcgctgccgttcctcaatggcggccagccgatttcctgggttccggaagtgcccacatggctgtcgcttgtcgtgatcgttcttgcgattggtggtgcggctttggcaagtgttattaagatgcgcaccatgaaagcgaacgaaaagtgacagtccggcaaacgttgggagaatagagcttttctattctcctacgaaattgtgagcgctcacaacacacctagttctgaggtggaagtgggcgctttttgctagtaagctatgccattggaaacagggtcgtcagatccaaaatcaatatcaacaagaataggcaggcattcatgcgtaaagccaagatcgtagataccatcggtcccgctaccgagtccctggaaggcatcaccagccttgtcgaagcaggtatggacgtcgctcgtctgaaccgctcccacggcactccggaagaccacctcaaggtctacaacaacctccgtgccgccgccaaggccactggccgcaacgtcgcagccctggttgacctgcagggtccgaagatccgctgcggttggttcaagaagaacgccgacggcgaggacaaggtccagctgaccgaaggccaggagttcgtcatcaccactgatgacatcgaaggcgacgagcacatcacctccaccaccttcaagggtctcccgggcgactgccatgcaggcgatccgatcctcatcgacgacggcaaggtccgcctcgaggtcaccaaggtcgaaggcaacaacgtgtacaccaaggttgtcgttgccggaccggtctccagccacaagggcatcaaccttccgggcgtcgccgtgtctctgccggctctgaccgagaaggacgaagaggatctgcgctgggccatccgcaccggcgccgacatcattgccatgtccttcgtgcgcttcgccaccgacatcgatcgcgcccatgagatcatggacgaggaaggccgccgtatcccggtcgtcgccaagatcgagaagccgcaggccctcgagaacctcgaggagatcgtcaaggcgttcgacggcatcatggtcgcacgtggcgatatggccgtcgagtgcccgctggaagaggtcccgctggccaccaagcgctgcatcgagctggctcgtcagtacgccaagccggtcatcgtggccaccgaagtcctcggctccatggtcagctccccggtcccgacccgtgcagaggcatccgactgcgccaacgccgtcctcgacggtgccgacgccaccatgacctccaacgagaccgccgtcggcaagtacccggcagtcaccgtgaacaccatgagccgcatctccaccttcgccaccgagcatggtttcgaccgcatcccggagctgaagaacctggatatgtcctccacaggtgccgtctcttccgccgccgtcgacctggccgacaagctcaacgccaaggccatcgtcgcctacacccagaccggttccaccgtgcaccgcgtgtcccgtgaacgtccggccaccccgatctacggcatcaccaacaatgagcacaccttccactggctggccctgtcttggggcaccgagtccttcctggtcgacgaggattaccatgacaagtcccgcaaggacctcatggttttcaccgacaaggtcctcaaggacgccggcaaggtctccgatggcgacaagatcgtcgtgctgagctccgcccagggcgaacaccagccgggtcgcaccgattccatctacgtccacaccgttggtgcctgcgactgagatttgaatcgtcgcgttaaacgctgattccataatcctcccattggttcccgatgggaggattattgtttttacgcgatgtccccgaatgatgacaacgccgagatttggcgcaaatcgcaatcatgtggtattcttccagagttgcgtgcaagccctcgtatcccaattggtagaggaagcagcctcaaaatctgcgcagtgtgggttcgagtcccaccgagggcacgtaagaaatcaatatcaatccaggcccgggttggggcatgttaggccggctttgggtgtgacagtggaaagagaccgacatggctgcagagaagaccacggaaccggacgaagtactcactgatgaggagctccaagctgctgcggctcccgagccggattctgccaataataacgaggcgcacaagcgcaccgtcgtcgttgccgaagacgaatccgtgaaccgcatggatttggtcgccatgcttgaggataacggctatgaggtcgtcggagaggccgccaacggtgaggaagccgttgaactgacccgtaagttccgcccgagcgtggtgtgcatggatgtcaagatgcctcgcatggatggcatcgaggccgctggcatcatctgtgatgagaacatcgctccggtcgtcatgctgacggcattctcccagtctgatttggtcaaaaaggccacgggcgctggcgccatggcgtatgtcaccaagccgtatgaggaatccaagctgctgccggctttggaagtcgccatgggccgtttcgccgaaatcaacgatctgcttgacaatgtcgaacgtagcgagtccaaactgcaggaaaccgaggaacagctgaagaaggccgaagagcagctgaagaaggccgaagaaacgctggaggagcgcaagctcgtcgaccgcgccaagggcctgctgatggacaaggcggacttctccgaacagggcgctttccgttggattcagaagacctccatggaccagcgcattccgaagaagcgtctggccatggccatcatcgccaagtatggcgaacagaagtcggaagcagaggatgagcgctaacacaccaactgtggaaggcacttcacgcggaacgctattggtcgttgacggccattctttggcgttccgcgctttttttgccttacccgtagagaatttcagtacatcatcaggtcaggccaccaacgcggtctggggattcgccaccatgctttcgcaggtgatcgatgccgaacatccagaccatcttgccgtcgcattcgatgtgaagggcggcacgttccgcaaccagatgctgccgcagtacaaaggaactcgcgacgcggcccccgaggaactgctcagccagctgccattaatccagcagatgctgacggccttgggcgtcacatacatcgaaaaacccggttacgaaggtgacgatgtgatcggcacgctcgccagcatgggcgaccaggcaggctaccgcacattggtgctgtccggcgaccgtgatgctttccagctgatcaacgacgacatcaccgtgctgtatcccggccaccatttcaaagacctcaaacatatgaccccggatgccgtgcaggagaaatatcatgtctctcccgcgcaatacccggatctggccgccttgcgcggagaaaccgctgacaacatccccggcgttcccggagtcggcgacggattcgcggccaaatggatcaaccagtacggcggacttgagcagatcatcgaacacgccgacgagatcagcggcaaaaaaggcgaagccctgcgcgaaaacatcgaacaggtcaaactgaaccgttccgtgaacgctttggttcgtgaccttgatcttggcgtgtcggtatccgacctgacatttggacaagtcgacgctggtcaactcgacgatctattcaccaagctcgaattcggtgttcggaccaagaatcgcgtgctcaaaacgttcaatgcggacaaaccatccggggacgtgcacgaatccagcaagctcgggctgccacatgtcgaagacgtcaacgatccgcatgtggtggagacatgggtccaaaaccatttccccgtggtgcaggaacatctgcacgaacgccatgaacgctcctccaacgacattccggaattcggcttcgaaatcgattcttcgacccgctgcacggacaaggtgaaacagtcctggacgctttacgccgaaggcacgagcaaacccggagaagcctctctttcggcattgatgatcgccgtgcacggcgaagccattcgcatcgacgtattcagtccggatatggtgcaatgcctgcaaaggctgttcgaccgctatcaccattccatggtcgtgcacggttacaaagaacatgcgcatctgctgggcagcatcggcgtggaacttccggaaccattgttcgacaccaagctcgccggatatcttgcccacccggatttccacgcggacacgctggaacaggctgcggcccatttccttgatctgcacatcgaagcacaagccgaagccgcgacacaggggaccttggacttcgacgagcctgaggaaaacgattccaagaacgacgagctgatactcacccgcaccgcaatcgtggggcttttggccgaatatttggccggtgtgctggataagcgcgaacaattcggtctcctcaaatccattgagcttccggtctctcaggtcctgcatggcatggaacaggtcggcgcccaagtggatatgacacgtctggtgcagatgcgcgaccaacttgccgccgacgctgcccaggcacaggaaacggcgtggcagttcgcgggggagcaggtgaacctgcaaagccccaaacagctgcagaagatcctgttcgaagacatgggattgaaaccgacgaaaaaaaccaagtccggttcatacaccaccaatgccgcggcattgcagaccttgcgtgaccgctcgtacgataacgaccgcgcatgccagttccttgacgcgttgctgatgcatcgtgaaaagaacaagctcaagcagatcgtgcagacgttgatcgacgccacaaaccgtcatgacggtcgcatccacaccactttcgaacagacggtggcagccaccggacgattgagctccgtcgatccaaacctgcagaacattccgaaccgggatcccgcaggtcgtgagattcgatccgcgttcgtgccgggagagggcttcgaatcgttgctgagctccgactactcgcaggtcgaactgcgcatcatggccgacctttccggtgatgaggcgttgatagaggccttccgctccggcaaggacttccataagtatgtggccagcttggtctacggcattcccgttgacgacatcacgtccgatcagcgtagccacgtcaaggcgatgagctatggacttgcctacggtctgagcacgtatggacttgcccagcagctcaagatcaagcccaaagaagccgaatcgctgaaaaaccagtatttcgccacttttggcaaagtccatgaataccttgaatcgcttgtctcgtccgcacgcgaaaaaggatataccgaaaccattttcggaaggcgcaggtatttccccggtctcaaatcgccgaaccgtgccgtgagggacgcggccgaacgcgccgcgttgaacgcgcctatccaaggctcggcggcggacatcatgaaaatcgccatgattcgtgcgtatgacgcactgcaggaagcgaaccttggaagtcgcctcatactgcagattcatgatgaacttgtggtggagatcgcgcccggtgaggagaagcaggccaccgcgctggtgaaggatgccatggagcatgccgtcaccatggccgttccgttggacgtatcgacgggcatcggttccgattggcaattggcggcccactgatccgttcccgtcggataatcgaaggctgattaaaaaagaaagaaggaagattgtggcaacgctgaagcaggtcgtggatgtgcttgaaacgctgtatccgctgcgatacgcggaacaatgggatgagccgggactcatcgtgggagaccttcgccacgacgtgcgcaacatcgcgttcgcggcggacccatccatggcggtgatcgaccaggctatcgccggaggcatcgacctgctgatctgccaccatccgctgttcttccgttccgtgcatgcggtctccggactaggattccgtggtgagatcgtccggaagctcaacctcgccggttgcgcgctgtgggttgggcacaccaatgccgatgcctcctaccgaggagtcagcatggccgccgccgacgcgttcggcctgatcgaacagcgtccgctggtacccatcgaagatccgaaagccgaacatccggtcggattgggccgtgtcggccggttgcaggagccgatcgcattgcgtgatttcgcccgtcgtgtggccgacgcgctgccatacaccgaacttggcgtgcaggtgtgcggcgaccttgacgcgacgatcggcacggtggcggtattgccgggctcgggcgattccctgttcgatgaagtgcgtgccgcaggcgtcgatgtgtatgtgaccagcgatctgcgccatcatccggtgaccgatgccatcgagcaggcgcgctatgaggcgtccatgcgtgccgcggacatcgaactcggccgaggcgacgccactgttcgtccgatgttcatcaacacgccacacagcgccatcgaatccatatggttccaatacgccatgggcgatgtgcctcgtgccgtatctgaggcgaccggagacatccccaccgtccgctggatttccatgaacaccgatccctggaatctggtactgccgtcctgcgggcaggaacgctgaacgacgatgtccgatacgaccagcatggatatgtcgctgaacgaatccagcgatggcgtggacatgaccagaccggccacagtactcagcagagagcacgtgtatcaaggcgcgattttcggcgtggaggacatgcgtatcgcgttgcagacacgagacggcggacaaaccgtgatccgcagacaggtgatgcggcacgcgccctgtgtggtcatgctggtgcatgactgcgcgcaggatttgtacttggtcgaacgagaataccgtgtcggctgcgacgccttcgcctacggtctgccggcaggactcatcgatgacggggaagacgtcgatgcggccgcattgcgtgagctgcgcgaagagaccggcgtcgagccaatcgacgaaaacagttgcgatatcgaccatgtcgggcaattctattcatccgaaggcatgaccgacgaactggccaacatcatggtggtgcacctgcgccactggcaggccgtcgaacggcatttcgacgccgacgagcatgtcgaatctgcttggatcccgtggaagcagctacgagacacgcacatcacggcctccaattcggagatcgccattttgcatgagcaaattcgcagaatgcggcaacaatagcggcctgcaggtttcgaattgtaaaaacaatcgccggaataaacgaaataacgaattcaactcgcaaaacgtgcgatacttgaattatgcaaatcagacctggatcgatgtatccactcggtgcgagctacgacggcgccggcgtgaatttcgccctcttctctcaagtggcccagaaagtcgagctttgtcttttcgatgaggaagaccgtgagacccgagtggaaatgacggagcagaactcctacgtatggcataactatctgccgggaatacaacccgggcaacggtacggctatcgtgtgtacggtccgtatgatccagcaaagggcctgcggtgcaacccgaacaagttgctgctcgacccgtacgcaaaagccatcgagggaaacatcgacggtgacgaaagcctctattcgtattggttcaaaagccctgaggacgtaaccagcatgaatacgctggattccgcgccgcataccatgaaatcggccgtggtcaatccgtatttcgactggggcaacgaccaacatccgaacatctcctaccatgattcggtaatctacgaagcccatgtgcgtggcatgaccaatctcaacctggacgtgccgccggacatccgtggaacctacgcgggcctcgcatatccatcggtcatcgaatatctgaggaagctcggcgtcaccgccatcgaacttatgccgatccaccagttcgtcaacgacagcttcctgcaggaaaaaggcctgagcaactactggggctacaacaccatcggcttcttcgcgcctcataacgcgtactcaagctctggacaacgcggcgagcaggtcaacgaattcaaatccatggtcaaggcctaccatcgcgccggcatggaagtgatcctcgacgtggtgtacaaccacaccgccgaaggcaacaacctcggcccgaccctaagcttcaaaggcatcgacaacggtgcctactaccgtctggtcgacaacgaccgacgccactacttcgacacgaccggcaccggcaactccctgctgatgcgctcgccgcacgcgctgcagctcattacggacagcctgcgctactgggtcaccgaaatgcatgtcgatggtttccgattcgatcttgcggccacgctggcccgccagttccaggaagtcgacaagctgtccgccttcttcgacatcgtcgaacaggatccggtcatctcccgtgtcaagctcatcgccgaaccttgggatttgggttccggcggctatcaggtgggcggcttcccgtccagctggtccgaatggaacggccgctaccgtgattgcgtgcgtgacttctggcgttcgcgaccatcgacgctaccggaattcgccagccgtctgatgggcagctccgacctgtatcagatgaacggccgccgtccggtggcttccgtgaacttcatcaccgcacatgatggcttcaccatgaacgatttggtgagctacaacgagaagcataacgacgccaacggcgaaggcaatagggatggcgaaagcaacaaccgttcctggaactgcggtgtcgaaggcccgaccaccatcaaggacgtcaacgacctgcggcaacagcagatgcgcaacatgttcgcgacgctgctgtgcagtcagggcattccgatgatctgcggcggcgatgaggtggcacgcacgcaacagggcaacaacaatgcctattgccaggacaacgccatttcatggaccaattgggatcttgacgatagtcagaaggatctgcttgagttcgtttcgaagctgattcatctgcgactcgagcacccggtgctccaccgtcgtcgtttcttcaccggccgcgagccaggagacccggacgataagattccgcaggtcgaatggatggaccacaccggttccatcatggacatggaagattggtccaatacccacgcgttctcggtgatgatctatctgaacggttccgatattccggaagccgactggtatggcaaccagatggtggacaataacttcatcctgattttcaacgcgcattacgagccgattatgttcaccttgccggacgagcggtatggcaagaaatggcgtctggtcgtcgacacgcataatccgaagggtccggaactcaactatgaggccggcttcgcgatcacggcgcagtcgagaagcttcctgttgctgatgagcgatagaaagcccaccacaaagaactacgatttctgatagccatgagaacaggcgaggtgccatccgtacgggtgacacctcgccgtattgtttgtggactgtgctcgtgaaccgttacgagaattagacttccgacgagagtcgggaaacggttccaggaacggtttcgctgacctccgcaagatcctcgacggattctggccgcttggtttgcgccagaataagctgcgtctgcacacgatcggattcgatggccgcaatctgccgtgaaaagatgatgaaccagcccagaaacatcatgccggcaagagcctcgacgttcgtcaacgtgttacgccccgccaaccactggaacccggcaagagccccgatcacgatagctaggtctgaaatcacatatactacttttgaaagctgcggggccagccaaggcagcgcgatcatcagcacgctcatcaggcagggaagaccgcgggcgaatacgttgtgcagaatcggatgcggcgtgtaacggaacatgccgatgccgatgaaggcgatgcctgcgagcgtcagcatggtcgatagcagaagaatccgcgccttgaagtgtttgggagcttctttttcatcgcttgcagacagatactgcatctgcagacggtgcgtggtgatgagctccgaaatcgcgaaatagctgatgatgacgatgcagacgccggccaacatcaatgtcgaattgaacatacgagcagcaaaagtggttcgatcgcccaattgggagaaattgttgttgtaccagtatggatcatcggacgtcaatcctgcgatgctgacaccggaaaccacgaagaacggcaacaaggatgcgatggtcttggcattcatgagttccgcctgtacgaacgtgacatagcctacgacccccgagatcgcggcgcagagcgcagtcagatagccttttaacgtgcgcaaccccatcatgttgctggcaatggaaagcagcatgaacgccgtgacgaaaatggtcgacgcgtagaccacggacaaagcgagtatctcgaagatacggcgaataggaatggtccagccatgtttcaacgtcatcgacctggagttgcgcgcataccccaaggtgaacgagatgactccacatcccgcggtgattccggcacacacggtgaacaggcgttgggtgacacgccagatggcgggagcgaattgcagatataggtccatggcgatccatgcaagagtggcgcatgccatgaaggaaatgatgcctgaagcctcggcttgctgatgacgtcccatgcgcgttccctccagtatttgccattctagcctgtcgttgtcctaccatacgctacaatggaaactcgtgttcacctgccacgtgcgggagtgcatgaacgggctgtagcgcagtttggtagcgcgtctgctttgggagcagaatgtcgcaggttcaaatcctgtcagcccgacaacgaaagtaatgtcctccgcaatcggatagattgcggaggacatttagttatatacgcgatcgcatcagtcctgaatgacggtgccgacaatgccggagacgatggccataatcagcgatccgattacggaccaccagaatccatcgatggttactcccacgtcgaacaggcttatggccagccaagacgcaagctccatgaacagccagttgatgattaacgcgattagtccgaacgagagaatcgaaaatggcaatgcgatggtgtgcacgatcggtttgatcgacgcgttgatcaacgcaaggaacaacgcgaacgcgccgatgccgagaatgggtggttcgccaacggcgtgcatgccgggaagcagtgtgaccatgaccccggccgcaatggtcaaaaccaaccaacgtgaaatgaaatgctccatgacagcatcgtattacattgcgttgtcttatgaaaaaggaatgtatttgtggaacatgccaggaagacgacctatgcgagacgggcgcggcgttttccacatggtttggttaccatgaaccatatggaagcacttcatgagaacctgtggccggcaccgtatgccggcaaaccgttgaacgccactgtggtggtaccgggcagcaaatcactgtcgaaccgttatctcattctcgcggcgctcggacatcgacccgtgcgattggtcggtctattgcgttcacgtgacaccgagttgatgatggacgcgttgcgcgcgttgggagtgcgctgcgaaatcgacgagcaggttgacaccacggttacagtggtgccgccgtccgacggccggttccacggtggtacgaaggtgttctgcggtcttgcgggaacggtgatgcgctttgtgcccggtcttgccatgttcgcggacggtcctgtggctttcgacggtgacgagcaggcgtacgcgcgtccgatgaagccggtgttggacggtcttgaacagttgggggcatgtatcgaataccacggcgaggaaggtcgactgccatttacaatcactccacctcaaacggtgagccagtgcgctgagccgagcgtggtcagcattgattcttcgggatcctcgcagttcatttcaggactattgctcatcggctctcgagtgccaggcggtttggaactgcatcacacgggggagaagacgccgagtttgccgcatattcgcatgaccgtggccgatctgcatggttccggcgtgcgtgtcaacgcagacgaacacgctcgcgtgtggaccgtgcagccgggagccgtgcagttgcccgaaactgtgacggtcgaacctgacctgtcgaatgccgccccgttccttggcgcagcgctcatcgccggaggaaccgtgcgcgtacctcattggccggaatccactacgcaacccggaggcatgcttccgggatatttggaacgtatgggagccgagatcagcttcccggtgattgacgacgtccggtactgcgaagtgaccggcaacggtcatgtcagcggcctaggtgatttcgacttgacggcggcaggtgagatcgcgccgtcgcttgcagcgattctggtttttgcggacaagcctacccgcatgatcggcatcggtcatttacgagggcatgagacgaaccgtctggaggctttggccaacgagattacgcgcgttgggggagctgcccacgaactgcccgatggattggagataacccctgtgtcggcgaatcgtcttagaccatccgtgatggagacttatgccgatcatcgtatggccacattcgcggcgatgcttggcctacgcatcaaaggcatccaagtgaagaacgtcgccacgacggcgaaaaccctaccgaatttcgtggatctgtggaatgacatgcttgtttgacggatatgcaaaagtgacgtcgggggacgttcggtccgtctgacgagagcggacttgtttccgtaacatagcggaaggggctttccacaagaatagtttgtggaaagccccttccgctatgcgtcaagcctgcgggctcactcccattcgatggttgccggcggcttggaagtgcagtcaagcaccacgcggttgatctgacggcattcgttggtaatacgcgtcgagatggtggcgagcacgtcgtacgggatacgcgaccagtcggcggtcatggcgtcttcggacgacaccggacgcaacacgatcggcgagccgtaggtgcgttcgtcaccctgcacgcccacggaatgcacgtcggcaagcagcacgaccgggcactgccagatgtcgcggtcgaggccggccttggaaagctcctcacgtgcgatggcatcagcttcgcgcaacaggtcaagacgttccttggtgatttcgccgatgatgcggatgccgagacccggacccgggaatggctgacgccagacaatctcatccggcagaccgagttcggtgccaatggcgcgcacctcatccttgaacagggtgcgcagcggctcgatgagctggaatttgatgtccttcggcaggccgcccacattgtggtgcgatttgatgttggccgcgccatcgccgccgccggactctacgacgtccggatacagcgtgccctgcacgaggaatttgacttccttgccggaggcaccggcctcttcgatgacctgacgctgcgccttctcaaaagtgcggatgaacttctctccgatgatcttgcgcttcttctccggctcgctcacgcccttcaatgcggtgaggaagtcttcggaggcgtccacggcgatgagcttgatgccggtggcctcgacgaaatcatgtttgacctgctcggcttcgcccttgcgcagcagaccgtggtccacgaacacgcaggtgagctgctcgccgatggccttatgcaccagagccgccgcgacggcggagtcgacgccgccggacaggccgcaaatcacctgggcgtcgccgaccttctcgcggattttcttgacctggtcctcgatgatgttggacgcgttccagttatcgccgaggccggcgcacttgtgcaggaagttctcgatgagcttctggcccatcggagtgtgcttgacttccggatgccactgcacgccgtacagtttgcgggactcgtcctgcatggcggcgaccggtgcgccttcggtgtgggcgagcacttcgaagccttccggcgcggtcttgacggccacgccatggctcatccacgtgctttgctctgcgggagagccgtcgagcagaccctccgccttgtcaatggtggtttccgttttgccgtattcgcccagggcggccttgtcgacatccgcgcccaacgcgtatgccatggcttggaagccgtagcagatgccgagcaccggaacgcccgcgtcgaacagcttcttgtcgacgcgcggagcgcccggttcgaacacggaagcggggccaccggacaggatgatggcctgcggatccttggccagcatctcatcgaccggcatggaatgcggcacgagctccgaataaacattggcctcacgcacgcgacgtgcgatcagctgggcgtactgggctccgaaatcgacaacgagcacaggacctgcagccataacactctccctttaatatgaggtatcaagaaacggacaatactaactgctctattgtgacgttgcaaggagacattggaaacacgtgaacggagaatgaacgaatctcacaattgcttactcccacctactcaacacgccgcgtgtgtatctagggaaacgaacgtgggaaacatatgttaaccgactaaaaacgttgattttgagccgtttttcaatctttttgatagagtgtgaagtacgcacaaaaatcccgataaaagcacacatttgcgtacagaaaaataacaattgaacacacagtcgcaaaaaaacagcaaaaagtcgaaccgcgctcgtaatatgtgcaagtgactggaaatgaggcataccgcgtaaccgcaaggttttaggcatggctcatgacctaaggaaataaacaatcgcacatcacagtgcaggagtacaggagtacacatgacgagtcctgttattggcaccccttggaagaagctgaacgctccggtttccgaggaagctatcgaaggcgtggataagtactggcgcgcagccaactacctctccatcggccagatctatctgcgtagcaacccgctgatgaaggagcctttcacccgcgaagacgtcaagcaccgtctggtcggtcactggggcaccaccccgggcctgaacttcctcatcggccacatcaaccgtctcattgctgatcaccagcagaacactgtgatcatcatgggcccgggccacggcggcccggctggtaccgctcagtcctacctggacggcacctacaccgagtacttcccgaacatcaccaaggatgaggctggtctgcagaagttcttccgccagttctcctacccgggcggcatcccgtcccactacgctccggagaccccgggctccatccacgaaggcggcgagctgggttacgccctgtcccacgcctacggcgctgtgatgaacaacccgagcctgttcgtcccggccatcgtcggcgacggcgaagctgagaccggcccgctggccaccggctggcagtccaacaagctcatcaacccgcgcaccgacggtatcgtgctgccgatcctgcacctcaacggctacaagatcgccaacccgaccatcctgtcccgcatctccgacgaagagctccacgagttcttccacggcatgggctatgagccgtacgagttcgtcgctggcttcgacaacgaggatcacctgtcgatccaccgtcgtttcgccgagctgttcgagaccgtcttcgacgagatctgcgacatcaaggccgccgctcagaccgacgacatgactcgtccgttctacccgatgatcatcttccgtaccccgaagggctggacctgcccgaagttcatcgacggcaagaagaccgagggctcctggcgttcccaccaggtgccgctggcttccgcccgcgataccgaggcccacttcgaggtcctcaagaactggctcgagtcctacaagccggaagagctgttcgacgagaacggcgccgtgaagccggaagtcaccgccttcatgccgaccggcgaactgcgcatcggtgagaacccgaacgccaacggtggccgcatccgcgaagagctgaagctgccgaagctggaagactacgaggtcaaggaagtcgccgagtacggccacggctggggccagctcgaggccacccgtcgtctgggcgtctacacccgcgacatcatcaagaacaacccggactccttccgtatcttcggaccggatgagaccgcttccaaccgtctgcaggccgcttacgacgtcaccaacaagcagtgggacgccggctacctgtccgctcaggtcgacgagcacatggctgtcaccggccaggtcaccgagcagctttccgagcaccagatggaaggcttcctcgagggctacctgctgaccggccgtcacggcatctggagctcctatgagtccttcgtgcacgtgatcgactccatgctgaaccagcacgccaagtggctcgaggctaccgtccgcgagattccgtggcgcaagccgatctcctccatgaacctgctcgtctcctcccacgtgtggcgtcaggatcacaacggcttctcccaccaggatccgggtgtcacctccgtcctgctgaacaagtgcttcaacaacgatcacgtgatcggcatctacttcccggtggattccaacatgctgctcgctgtggctgagaagtgctacaagtccaccaacaagatcaacgccatcatcgccggcaagcagccggccgccacctggctgaccctggacgaagctcgcgccgagctcgagaagggtgctgccgagtggaagtgggcttccaacgtgaagtccaacgatgaggctcagatcgtgctcgccgccaccggtgatgttccgactcaggaaatcatggccgctgccgacaagctggacgccatgggcatcaagttcaaggtcgtcaacgtggttgacctggtcaagctgcagtccgccaaggagaacaacgaggccctctccgatgaggagttcgctgagctgttcaccgaggacaagccggtcctgttcgcttaccactcctatgcccgcgacgtgcgtggtctgatctacgatcgcccgaaccacgacaacttcaacgttcacggctacgaggaacagggctccaccaccaccccgtacgacatggttcgcgtgaacaacatcgatcgctacgagcttcaggctgaagctctgcgcatgatcgacgctgacaagtacgccgacaagatcaacgagctcgaggccttccgtcaggaagccttccagttcgctgtcgacaacggctacgatcacccggattacaccgactgggtctactccggtgtcaacaccaacaagcagggtgctgtctccgctaccgccgcaaccgctggcgataacgagtgagcctaggctatttggcctgattgcttgataaaagccccaaggaattgttcccttggggctttttcgtattacggtgcgatatgcttggcttaaaacagcaaaaccgctagcgcgtgtcagttaccgtttgcacattacaattgctcattgtgcgaacgatgtggtatcgcacccgaataatgtgaagtacataggagacaccgtgagttttaccagcgtcaccatcatcagtcccgaagcggctaacggccgtaatgttgtcgcccttggagtcaccaaggcacttgccgcagccggcaagaccggagtgttccgtccggcggtctgcagaaaagacaccttcacggacgtgctgatcgaagcttccaatgccggtttgagccgggaacagtccgtcggcgtgtgccccaagcgcgctcgtaacgataaggaaggttcgcgggcggatatcgttgcggcctacacccaagccgtagaaacagcccgaccggatgccatggtgattgtcggcaccgacaggtcagcagtcaatgatcccgcgatgttctctttcaacgctgacttcgcggcagacctccaatcgccggtcctgctggccgtatgcactatcgaacgcacaccggaacaagtcaaaagcacggttgaggcatccaccaaggtcatcgaagacgccgggagcaaagtcgtcggcgtgttcattactgggtgtgacgacacgcagccggatccgctcaaagcatgcttcgtcgactacccggtgccggtgtggacgctacctgccgtcgatttcaatgacgatgacgccatcagcaaggcagacgaagcgttcgcgacgaacgtcgacgccgcggaactgaccgcggtactcgaatcgccattcgacgccccgaccacaccctatgctttccaatacggtctgctgggcaaggcgaaggcggacaagaagaccatcgtgctgccggagggcaacgaggatcgcatcatcaaagccgccgattatctgctggaacgcgacatcgtcgatctgatcatcgtcggagacgaaaacgccattctcgcccgtggtcaggaattgggattgaaatcgcttggcaaggcgaaattccaagccaaggatgataaaacggtgttggaacccatggtggcgaagctgtgcgagctgcgcgccaagaaaggcatgaccgaagagcaggcgcgcaaacagctggccgatgacagctatttcggcaccatgcttgtggtgatgggcatggcggacggcctcgtgtccggttccgtcaactccacggccaataccgtgcgtccggccctgcaggtcatcaagaccaagccaggaacatcgttggtatccggagcgttcctgatgtgtttcaaggaccatgtcgccgtgttcgccgactgtgccatcaaccttaaccccaatgccgagcagctcgccgaaatcgcgatccaatccgccgaaacggccaaggcgttcggccttgaaccgaaggtgggcatgctgtcctattccacgctgggctccggaaaaggacccgacgtcgacctcgtcgaggaagccaccaccatcgtcaaagacaaggctcccgaccttgcggtggtcggatcgatccagttcgacgcggcatggtctccgaccgtggccgcgaccaaagccaagggcgatccggtggcgggccatgtcaatgtgttcgtattcccggatctgtgcgcgggcaacatcgcatacaaggcggtacagcgttcctcgggagcggccgccgttggaccggtgctgcagggtctcaaccgcccggtgaacgatctgagccgtggcgccacggtccaggacatcatcaacaccatcgccctgaccgccatcgaagcccagtaatcgggcattttgtagcaagcaacgagtaatctaaggttttggaaagtcgcgtaagcggcacatcgattaacacatggaggatgcccacaatggcgaaaaccgtccttgtcatcaattccggttccagctctatcaagtatcagctggttgatcttgaaaccggcgaaggtatcgcttccggtctggtcgagaagatcggcgagccggttgacggtcattacaagcacgagtacaacggcgagaaacatgagctcgaagagccgattcacgaccatgagcagggtctgaagcgcgtgctcggcttcttcgacgagttcggcccgaagctcgccgacgcaggcatcgtggccgtcggccatcgcgtggtgcagggtggttccatcttcccgaagccggctctggtcaacgacaagaccatcggccaggtcaaggacctcgccgtgctcgccccgctgcacaacggtccggaggccaagggcgctgaggtcatgcgctccctgctgccggatgttccgcagatcttcgtgttcgattcctccttcttcttccagctgccgaaggcttccagcacctacgcgctgaacaaggaagtcgcccagcagtaccacatccgccgttacggcgcccatggcacctcccacgagttcatctcctccgtcgtgccgtccgtcatcggcaagccggccgaaggcctcaagcagatcgtgctgcacatcggcaacggtgcttccgcctccgccgaaatctccggcaagccggttgagacctccatgggtctgaccccgctggaaggcctcgtgatgggtggccgtaccggcgacatcgatccggccgtcgtcttccacctgattcgcaacgcccacatgagcgtggacgaactggacaccctgttcaacaagcgttccggcatgatgggtctgaccggcttcggcgacctgcgtgaagtgcatcgtctggtcgaagagggcaacgaggacgccaagctggctctcgacatctacgtgcaccgcatcgtcggctacatcggcaactacaccgctcagatgggtggcgtcgacgtgatcaccttcaccgcaggcgttggcgagaacgatgacgtcgtgcgcaagatggtctgcgacaagctcgctccgttcggcgtcaagctggatgaggagaagaacgcgacccgttccaaggaaccgcgcatcatctccaccccggattccgcagtcaccatctgcgtcatcccgaccaacgaggagctggccatcgcccgcaagtccgccgccatcgcagaagaaggcaaggactcctacggcaacgtcttctccaagtgagtgacgtgtcacgtttcggctggtagaggaacgtgacggcaaacggtatgaatctgcgccgccgtgcctgataatcgatatcatcggtcaatcaggcacggcggcgcagtgcgttgggcccccttttccgcgattcgcaagggattgcttggtagtacgatacgacaggttgcactgtaccgtgcaatgatgtaagagagaacggttggttattcgtggctgctaaacgacgtttcgtcggtttggacgggcttaaaggcatagctcttattgcgattgtgctgtatcactgcgatgagctttcgcttcaaggcgggtttttcggtgtggatgtgttcttcaccatctccggtttcctgattttctcatcgctgctcaatcgtatcgattcaggtaaaggcttggaactgggggagtacttcctcaaacggttccgccggatttatcccgcgctgtttgctcttatcccgatctcggtgacgttggcatggctggtgaaccgcgacatgcttgtcggcatccggaaccagatcatgaccgtgcttctgggatgctacaactggtatgccatcagcagcggagccagctatttctcccagatgaaccctgacatattccgtcacctatggttcatgtcgttgctcatgcagttttatctgatcgctccattcgtggttttgctgctgcgaaaaatcatcatcagatgggctccggtatgcatactgacagcccttgccggagcaagcgcggtatccatgggactgctataccactctggcgctgaccccacacgtgtgtatttcggcaccgacacgcacgccatgggcctatggctcggtgccgcgctggcttggatactgccgattctcagacatgagcatgggcgagccaatgaatcgcggataatggaacgattccataagatatggattcaattcggcccgatagttgcctttggctcattgctggcattgctgtggatgatgcggcatatcactcaaggcccagcggcgttccatggcggtatcttcgtcgcctccgtgcttgctgtggtgctgatcgcaggaaccataccattcggatcctggatgcaggatctgcttgtgttcaagccgcttgccgctttgggccattattcgtatggcatttatctgtggcattggccattatggctgctgctgaagatcctgctgccccagtggggcgcatggcatgccgacaggctgctgtccttcaccttcatcctcaccgtgctgttcgcgttcgcatcttggcgactgttcgagaagccagtcgctcgtgcgggattcatcgcgttgattcgtccgattagtggatccgaagccgagcattgcggccgtctgatatccacggtcgtggtgctggcatgctcatggagcttctgcggatacgctgtggcgacggcaccggaacaaaccagtgtggcgcaatccttgggtatcagcgccaggctgttgcagcaacgcaatcatgccgctttggaacgacgcagaacaccgatgccaaggaagccacggcataagatgccggatggttcgcaaatggccgccatcggagattcggtgatgctggcgtccagcgaaggattgcaggacacgttccccaacatcattgtggatgccgaagtctcacggtcgatggcgaagggacagggtcttgtcgatcaattgaaagcgcaaggaaatctgcgcccctgggtcttggtgggacttgccaccaactccgtggtgaccaatgatcagcttgacgatctgctgaatgatgtcggccccgatcatgtgctggtgctcattaacgcgcacgctcccgtttcatgggttcccggcaccaatgccgtgttgaagcaattcgccgcggcgcattccaacaacgtcgtactggtcgattgggacgggaccatttcccagcatgctgacgaacttgccggagatggcatccatccgggaatgtccaatacgatctacgcgcaggcggtcaaggattcaatcgccgcctggatcaagcaagggcactgattgatgcgttgacgacttccatacgaggtccgccacatgccgtcgcatatgaatgatccccattccgtggaaatcggaatggggatcattcatatgcggacgatgccgatattagggaaatcaggcctcctgatgctgaggagcggacaggaagtgctcctcgctaggcagaacggcgttgagaatcacagccaccacgaacgacaccgcgatgcagttggaagcgaagatggactggaacagcgccgggaagttggcgaaaatgtcgccgacctgggtgaaaccgatgccaatggtcaggctcaacgcggcgatggtgatgttgcgctgcgtgtaaccggcctcggaaatcatctggaatccggacaggatgatattgccgaacatcatgatggtgcagccgccaagcacagcctgcggcagggagttgaagacctctgcaacggccggaacgaagctggcaatcaccaaaatcagaccgccggaaagaatcaccttgcggttgaccaccttggtcatcgccaccagaccgatgttctgcgcaaacgaagtcaatggcaggcagccgaacaaaccggacacggaggagatcaaaccgtcgccggcaatagctccggcggtttccttgtcggtgggttgacggtcgagaccgaccttggcaagcgccgctgtgtcgcccaacacctcaaccgaggaaacgacatacagcagagcgaaggagataatcgcacccggatcaaactcaagcttgaacggcatgaaatgcggcaccgacacgacctgcagattggcgaaaccggagaaatcgacctttcccatgaaaatcgcgaccacatagcccacgacaaggccgaacagcacggaaagctgcttggcggtgcccctcatgagcagctggaacgcaaggcaagccaccagcgaaatcaggccaagcgtcagattctgccagctgccgaaatccttcgcgccggaaccgccgccgaagctcgtggcgccgacggacaggagcgaaaaaccaatcgaggtgacgacaatcgcggaaacgatcggcgggacgaaacgacgccaatacttggccgtcaaaccaagcacgacctccaacaggccgccaagcaccacggcgccggcgactgcgccataaccctgatgctgcgcgatcgacatggcggccgcgacgtaggtgaaggaaatgccggtgaccatcggcagacgggaaccaatcagccacacaccgtacagctgcaggcaggtgccgagacctgcgaccagcaggccggcctgaatgatggtggcggactgcgcggcatccatcttggcggccgtggccaccaggaagataggcgcgagattcgccacgaacatggccatgacgtgctgcaggccgaacggaatgcccttccagaacgacaccggtgcgtcaagactgctcaacgcctcaaaagacacgccttttttcatgtcttttgccttcgtctttttttcggttttctctatgttcttctcttcgctcaactgttacatcctctcttataatcgtttgagcgtactgaaaaaatcaggagcggaattcgatggtgccgttttccggatccatcgattcgacgattgccagggaatcgacgtcgtacccttcctcacgcagctggttgccaccgccttggaagcccttttccactgcgatgccgatgccttccacagtggctccggcctcatggcacagctcgatcaggccttttaacgccttgccgttggcaaggaaatcgtcgatcagcagcacgtggtcgccttcattgagatagcgtttggacacgatgacagggaactccttctgcttggtgaaggaatacacggtggtcgtgtactggtcgccgtcaagattgatggactgcgccttcttggcgaacaccaccgggacattgccgaaatgacgggccactacacaggcgatgccaatgccggaagcctcaatggtcagaatcttatcgatggtcttgcccttgaaatgctcggcccaggcggcgcccatatggtcgaacagctcgacatcgcactgatggtcgaggaacgcgtccactttcagcacattgccgggtttgacggtaccctgctgcacaatgcgctcttcaagctccttcatgaaaccccttaatcttgtcggccgcgaaagcggcatcagatgatggtatacggcgagccgtatataggagttcagcatacgcgcctcaattgaccatgcgagtcggacccctgacctgctcatgtgataaacatgaatgctgcgaacaaatgtttgaatatgagcgtgcgcgaagaaaagaggaatcggtggaacagagcatgggacctgtgatgtgcgatccgcggagcctgatagagggactcaacccccaacaggaagaagcggtgaaatactacggccaggcattgctcatcggcgccggcgcaggctcaggcaagacccgtgtgctgacacgtcgcatcgcatggctgctggcgcatggcttctgggcaagcagcatcctcgccatcaccttcaccaacaaggcggccgcggaaatgcgtgaacgtctcgtgactttggtcgggccggaagccgaacatatgtggatctccaccttccactccgcctgcgtacgcatcctacgccgcgacggcaaggaaatcggccttaaatcgggcttctcgatttacgacaccgcggacagcgagcgactggtcaaactgatcgcagccgacctgaacatcgatacgaagcggtatacgccacgcatgctgctgggcaagatatccgactgcaagaacgcgttggtttcctggaaagaccagctgaaaaaagcgaactgcgattacatcccgggacagcgcggataccaggtgagcgccggcgacgtcgacgaactggtcgccgtcgtctacgccgaataccagcatcgtctggcgctcgccaacgcagtcgacttcgacgatttgatcatgcgcaccgtggaattgctccaaacctgcccgcaggtgagcgaatactatcggcacaggttccgttacatcttcgtggacgagtatcaagacaccaaccatgcccaatatgtgctcgtacgtgaattgtccggcatcgattcggacgaacagcccgacccgcaggcgaggggagcgggccgtgtgggaccgagctggattaccgtggtgggtgattccgaccaatccatctacgcgttccgaggtgcggacatccgtaacatccaagacttcgaacaggatttcccgaacgccaaaaccatcatgctcgaacagaactaccgttcgacgcagaccatcctcgacgcggcgaacgcggtgatcgcgaaaaacgaaaaccgcaagccgaagaaactgtggacggcgcttggtcaaggcgacaaaatcgtcggctatgccgccgacaacgcacagcaggaagccggatggatagcgaacgaaatcgcacgaatccacaccgaggaagacgtcgcttaccgtgacatcgccatcatgtaccgagccaacgcgcagtcacgttcgctggaagaggccatgatcaacgccaatctgccgtatcagctggtcggcggcaccaaattctatgaacgtagggaagtcaaggacgccatcgcgtatttgcaggccatcgtgaatcccgcggataatgtgaacgtgcggcgtatcctcaatgtgcctaaacgaggactcggcgcacgcgcggagggattggtggccggctacgcggacgcgcatggcctcacgttcttcgaatccattgaacatatggaccagattgaaggcatgacaggccgtaccaccaaaccgttgggcgcattccgtgatctgatgcacgagctggccgatttcgccaaggaacatgattcgaaaccatccgaagtggtggccgaagtattggataaaagcggtcttctggaggaattgcaacgttccgaggatccgcaggatgcttcgcgtgtggacaatctttcccagttgcagtccgtggccgccgaattcgaacagaacacgccggatgccacgttggccggttttctggagaccacggcattggtcgccgactcggatcagttgccgggagagggcgaggattccggcaaggtcacgatgatgaccttgcatacggccaaaggtttggaatatccgtatgtgtttcttacgggtatggaacagggtacgttcccgcaccagcgtgccatggaggacaccagcgagctgtccgaggagcgtcgtctggcatacgtgggcatcacccgtgcgaagcgtcggctgtatgtgacccgtgcggcggtgcgtgcccaatgggggcaggccaatgacatgatgcccagccagttcttggatgagattccggatgaactcatcgattggaaacgtcgtgaggccggtgtggagcgcatgcgcgccagctggggagatgacgacgagttcggcgggtgggacgatgatgacgatttcggatccacttccttcggcgaatcgatgtacggatcgtcgacatacggttcctcatcgtatggttctggttctcgcggatcgcattccacttatgggtcgtctcatggatcgcacagctcgtatggttccggacggtcctcctacggctcgggaagccgccgtttctctggcggattgcactctggctcgtcctcatacggttcgtatggctcatcccggtcgtcatacggttccggcaagccctccggcaaatccggtaaggtcaccacgcgccgcgccaagccaaaggatctgacgaaatcggctccggcaagttcgttggacggcaacaacggattgagcatctcggatttccagataggcgacagaatcacccatgaccattacggtttgggaaaggtcatcgaaacgcaggacaagggcgcgaattcggtgatcaccgttgatttcggcacggatggcgtcaaacgattgctgcttcgtgtggcgcctattgaaaagctctgacggcttttccaataggcgccacacgtggcggcgccgttgtgggctcataacacggattgagtgaaaaaacaagtcttttctttcggagcatttgttgcgataatcggcgatgtttgcttttcgagaggaagaaccatgccaagaaaactgttcgccgcgatatctcagattgttctgggcgcgctgattgtcatcgccccgcagaccttcgcgcatgtgtgtgccgtcaaagacatgcccatggcatgccgctacaccgctcgggtcgctctgggactgggtgtcgtcatcgcattgctggcaataatcggatttttcgcgccaagccgggtcagggccggattggatatcgccaatgccgtgctgggcgtgcttgtcgttctggtgccgaccatgctggtaggcgtatgcagaggctccatgatgcattgccatatggtgacgatgccgacgcttatcgtattgggcgtgctgctggcggtgctcgcagcagtcgccgtatatctcgatctcaagccggcaaagcgtggctgacgtgccgcatatcacccttgcgaaactaccgctggccaatctgcgtcgcaaaccattccgcacttcggcgcttgtcattgtggtcgtcatgctcactgtggcgttctatggaggcgcgctgctttccatgaacctgaacaatgggttgaacagcatgcgggaacgtatgggcgccgatctgatggtcacgccgcagaacacgaaaaaccaggctgaggcgttgcttacgggaaactcttcgagcacgttctacttcaccaatgacattggaagccaaatcgccgaagcggacggtgtgggcgaaagcacggtgcagacgtacatctcctcgcttgcggcagcctgctgcgacgaaaaggtgcagatcatcggcttcaaccccgacaccgacttcgtcatcactccttgggtggcttcgcaattcgacggcacactccgtcgcggccaaatcatagcaggcgccagcatcaacgtgtcggacaacaatacggtcaaactgtacggtcatgaattccccgtggccgcgcaactggccgataccggaacgtcactggacaattccatattcgtgaacatggacacggtgccggatgtcgtttcctattccgcgcaggtcggacatgccgcgattcctgaagaatacgccggcaaagcggtgtccgccgtgctcgtcaaagtcaaggacggatattccgcacaacaggtcgcctcgaatatcgcaaaagccacggggatcaaaagtttgggatatgtgtatccgggcggcatcacggctacgacgaaaacgaatctcaaggtgatcatccgctatgtggcggtgttcatcacggtgttctggactatgggattggtcgtgatgttggcggtgttttcgtcggctatgaacgaacgcaagcgtgaattcgccgcgtaccgtattctcggcgccgatcgtgcgaccctggtgggcattatcgtcaaggaatcggcgaccatcggagctattggaggtgtgatcggtgtgacctgtacctcgttggtcgtgtttccgttcagtggtctgatcgctaaggaacttcaattgccgtatctgcagattggcgtcggtaaagtggcggtactgatagtcgtcgctctcctgttcgccgtgcttacgggcctggtcgcatccctcgccacagcggtgcgtctttccgccccacaggcatacctgacgctgaggaagggggagtgatgccggaacagcccatattggaggttcgtggccttacccgtgaattcgtacgccgaggtaaacctttccccgcggtggatgatgtgaatctcacgctcgatccaggcgaattcatggcgatcgtcggcagatccggaaacggcaaaagcactttgctcaatctcgtcacgggattgctgaaacctacatccggttcgattctgctggccggtaacgaggtgaccacgttaaacgacaaacagatgtcgattttgcgcaaccgcaccatcggcttcgtcacgcagatccagacactattgccgaacctcaccgcaatcgacaatgtggtccttcccgcagtgctgcatcgcaacccgtctcggtatgaaaccgaaatcgatgaacggacgaatgacgcacaatcacaggaacagacggcgtcttccgtcgtggtcgatggccttcccgacgtcatccaaccagcttcgacgcagacggcttcttcatctcagcccgaccatttgacgcaacgcgcgcaacatctgttggatcaactgcttgtaggcgagcttgcgacatgctatccgaaggagctctctggtggcgagatgcgccgcgtctccatcgcccgagcgttgatgaacaagccgaaactgctgatcgccgatgaaccgacaggagatctggatgccgaaagcaccgcaatcgtcatgcggctgctgcggcaagtagcggatgacggtacctcggtacttatggttacccatgatccggacgcgcttgcttatgtggaccatacctatcgtatggataggggagtgcttactcgggcctgacgtttttaagacatgccgatgtaggtgaatcggagcatctcgtccgtcccccatgtgtatgattagcgattggtgtgcgcccggaaggacgtatgccgtctggagtcttagcccatcagtgggtcggcggccatccgtggtgttctgcattgcgggtcaagccgttcgcgcattgcgcgaagaagcactggagaggctggctcagcgtatgccggacttcggcatacgttccgttcagacaacgacagaacaaacaaaggattaaaccaatgacgaacgttcagcgttcccgccgtcaggtgcgtctttcccgcgccctcggcatcgctctgacccctaaggctcagcgcatcttcgaaaagcgtccgtatgctcctggcgagcacggccgcacccgtcgccgcactgaatccgattacgcagtgcgtctgcgcgagaagcagcgtcttcgcgcccagtacggcatctccgagaagcagctccgcgccgcttacgagaagggcacccacaccgccggacagaccggcaacgccatgctgaccgatcttgagacccgtctcgacgctctggtcctgcgtgcaggcttcgcccgcaccaccgcccaggctcgccagttcgtggtccatcgccacatcctcgtcgatggcaacatcgtcgatcgtccgtcctaccgcgtcaagccgggccagaccatccaggtcaaggccaagagccagaccatggttccgttccaggccgctgccgaaggtgtgcaccgcgatgtgctgccggcggttccgggctacctggacgtcaacctgccttccctgaaggccaccctgacccgcaagcctgaagccgaggagatcccggtgcaggtcaacatccagtacgtggtcgaattctacgcccgctgatctggatcaccatactgtaagaacatacagtttaaggacatacagcgaaagcctcgcagccgttacggttgcgaggcttctcgttttttttatggcgtttccggcggcatgtcgtttggctgattccacaggtaccatggaaaccatgttgcttcatcttcatctggtccgtcacggacagacgttcttcaaccgatataacagactccagggatggtcgaattccccgttaaccgatgcgggacttgccgatgcggacaaggccgccgccaaactccgggacattgagttcgccgcggcatactgctccgacaccacacgcgcccaggtgacggcacaacggatcctcgatgcgaacgaagccgcaggacacgttcgtccgtcactggtcagcgacatgcatttccgtgagcagttctacggttatttcgagggacaggacatgtccgtcgcatggaccgctgccggtggtccccatggtgcgaagaactacaacgacatcgtccgcaaatacgggcttgccgccacccgcgactttctcaaagaagccgatccgttccatgacgccgaatccgataacgagtattggcatcgtgtggaggacggcttcgctttgattgcggacaaccctcggcttaaggacggcgaccacgtgctgcagatctcccacggcaatacattgttgagccttatgcaccgattcgccccggaaggatacgatttgagcgaacgtccggccaacggttcggtgacctgccttgattttgacacgaacgaacccatggaccgcgcggtgagtgtggtctcgtacaaccagtgaacgtatttgccacagtcgtggctttttactagtcttatgcgggtattgtgttcgcgggcaaccgtggagctgaaaagaggtacaagatgggtgttggagagatcgccggtctgattgcggcaattgcattcgcggtgcttgccggtttcatgatctacccgctgatccgtctcggcaaattgttcgaccagatcgcgcagaccgtcaaagacaccggagaccatgcgattccggcgcttgacgagagcgtgaccacggtgcagcaggtgaacaagtccctggaggatgtcaacaagatctccgccgcggcgtccaccacggccaataatgtcggcgcgctgactgatctatatggatcgttcttgggcaagcccgtcatcaaggttgcgtccgccacctatgcgttgaagtccactgtgcagtctttcttggctaagagagacgtcaatcacgcggcaggcaataagggggagtgatgttcaagcgtcttttctgggtctccatcggcgtgggcatcggtgtcgtcgctgtcacaaaagcgcaggcatacgttaaagccaacacaccggacaccgcccgccaattcctgcttggtcccgaccaggaccatgtgaccatgcgcacgcttgaaggtctggtcaatgagttcaatgccacgcgtcgagcccgcgaggctgaacttaacagcaaatatgcggcgcggaacgagtagtcgttttccgcccgacagatacgctcaagcaaccaatcacacgtttggaaggcatcaggcctccaacaacaaaggagctcaaatccacatgcgcacttctgaaatcgcgaagcgctttcttgactatttcgaacagcacgatcatcttgtcgttccttcggcatcgttgatttctccgaatccgaccactctgttcaccatcgctggcatggttccgttcatcccgtacctcatgggtgagcagaccccgccgaagcaccgcatggcttccaaccagaagtgcgtgcgtactctggacatcgacgaggtcggcaagaccacccgtcacggcacgttcttccagatgcttggcaacttctccttcggtgattacttcaaggaggaggccatccactatgcgtatgagctgctgaccaccccgcaggataagggcggctacggcttcgatccggagaaactgtggatgaccactttcaccgacgacgaggaagcccgctcgatgtggaagaacgaaggcgtcgatcctgaacatatccagatcatgggtatggaagataacttctggaccaccggtggccctggccctggcggtccgtgctccgaaatctatgtagaccgtggtccaaagtacggtgtcgaaggcggcccgatcgccgacgagaaccgttacattgagatttgggatctcgtgttcgaaaactacgaggtcgacaacgtcaagtccaagaccgacctgcatatcgtcggcgagcttgagaacaagaacatcgataccggcgccggtctggaacgtctcgcctatctgatgcagggcaagcagaacatctatgagaccgacgaggtcttcccggtcatcgaagccgcgcagaagctttccggccgcacctacggcgatgacgaggccatggacgtgcgtttccgtatcgtggccgaccacgtgcgttccgcgctgatgatcatgtccgacggcgtccgtccgtccaacaacggccgtggctatgtgctgcgccgcctgctgcgtcgaaccgtcaaggccatgcgcgagctcggcgtgacagagccggtcatgccgaccttgctgccgacctccaaggccgcgatggaaccgagctatccggagcttaacgacaccttccacgacgtgtccgaagccgcctacggtgaggaggacgcgttccgccgcacgctcgaatccggcaccgagatcttcgacatggccgtgacgaaggccaagcagggcggctcggatctcgtgtccggcgaggatgccttcaagctgcatgacacttacggcttcccgattgaaatcacgctcgaaatggccgccgaccagggcgtgaaggtggatgaagccaagttccgcgagctgatggccgaacagaagagccgtgcccgtgcggacgcgctgaagaagcgccacaacgtggatttgtccgtctatgacgacttcaagaagaccctgctccagccgatcgacttccttggctacaccgacatgtccgcacgtgccaaggttctgggcatcatgcaggagggcaagggttccgttcccgccgtcaccggcccggccaacatcgaggtcatcctcgaccgcacgccgttctacgcgcaggccggcggccagctcgccgatcagggcgagattctgtccgacgatggcgcggtgcttgaggtcgacgacgtgcagaagccgatcaaggaccttatcgtccaccagtgccgtctgaccgaaggcacgctggttgtgggcgccgaagtcaacgcgaacatcgatctcgagcgccgtggagccattgcacgttcccacaccgccacccacatggtgcacaaggcgctgcgtgaggaacttggtccgcaggccacccagcgtggctccgaagacgctccgaaccgtctgcgcttcgatttccaatggtccagcgcccccagcaaggacgccatgaacgccgtcgaagcccgcgtcaacgagaagcttcgtgagaaccttgccgtcaccactcaggaaatgaagttcgatgacgccatcgctcttggcgccatgcatctgttcggcgagaagtacggcgacatcgtgcgtgtggtgtccatcggcgaggacggctggagccgcgagctctgcggtggcacccatatcgaccacgtcggcaagatcggcgccatcaacatcatgtccgaggcgtctatcggttccggcgtgcgccgcgtggacgcggtcgtcggccagggcgcgtatgagttcaacgcccgcgagcacgcgctggtttcccagctttccgacatggtcaacgcccgtcccgacgaactcgccgagcgtgtgaacatgctgcttgccaagctcaaggaatccgaccgtcgtcttgccgcaatgtacgagtcccagcttgcggcctctgtgccaacgctggtggctgaggccaaagcttcctcggctccggtcaaggtcgccaagaagaacgttggacatttcggctccttcgacgcgcttcgcaagaccgtgctcgacgtgcgcggccagctcggcgaagatgctccggtcgtggtggctcttgccggcatgaacgaggacggcaagcccatggtcgccgtggcaaccaacgaagcggcacgcaagcaaggcatcaaggctggtgatctggtccgtggcgcttccaaggttcttggcggtggtggcggcggcaagccggacttcgcacagggtggcggcgcggacgccaccaagatcgacgaggcacttgaggcattggccggccaggctctgaagggctgattctccaagcatggtttggcttggtatcgatctgggtgatgctcgggtcggacttgcgttgtccgatcccgagctcaccctcgcacatcccataggcaatattcaagtgtatggggattctttccgcgcgttggatgaagtcatcgacgtcattggggacgagtcggtggaccatgtggtgattggcctgccgttgctgctgaacggcgaagaggggaaaagcgccaaaaaagcgagacgctggtccgtcaatcttgaaaaacgactgcatgcggccgtggaggatgaatcatattcggtgacgcgggttcccaccattgaattggtggatgagcgtctgacgacagtgaccgcacatcatcagttgttcgatgcgcgcatcggcggacgcaagcaccgtccgatggtcgaccagcaatctgcggtggtgattttgcagacggcgctcgaccgaagcagagagtaaggggagagagacctttgaccgataatctgaacgattttttctccgataacgcgcagtgggtcgatgatacgtcagcgggctcgtcattcgatgccgcgttgccgccgcaaccgccgaaatcgcgacgcgacatgcgtaaacgacgtgagcaacaacgtcgtcgtcgccatgtcacaatcatcgcggctgccgtcgttgtcattcttgtcgtcgtcggcggctttttcggtgtgcgcatggttaaacatctcaggcaaatgaacgccaacggctcgcaaatccagattgaggattacaccggttcgggagacaaagacacgacgttcaccgtggaaaccggacaaggcgcagccgaaatcgcacgaaatctggtcaaggcggacatcgtcaaatccgaatcggcgttcacctccgcagtcgcggccgccggcgcgacgctttacccgggttcgtacgcgttgaagacgcatatgaaagcggccgatgtcgtcaagatcctgtccgaccaaagcaaggccggcggtttcgccgaagtcaaggccggcgaacgggtgtccgatgtcatcgccaacgcggccaagatgtcaggcaaggacgtgtccgaattccaagcggtcatcgacggtggcggcgcgggcattctgccagatgaagcgggtggcaaattcgaaggatggcttgagcccggatcctacagcgtccaggacaagtccgccaaggacatcctcaaggaaatggtcacggcacgcgtcaacaaactggacacattgggcgtgccagatggaagcgaacgcgaacgtatcatgaacatcgcgtccatcgccgaatccgaggcatgcaatcctgacgattacggtaaggtggcgagggtcatcctgaacagaatcgaccaggacatgccgttgggcatggacagcaccgttgcctacgggttcaacaccacaggcagcaagctgacagacgagcagcttgaggatggaagcaacccgtacaacactcgcgtgaacaaaggacttcctccgacgccgatcagcaatcccggcgattccgctatccaagccgcgatgaatcctccggaaggcaaatggctgtacttcgtcaccaccaacctcaagaccggcgagacgaagttcgtggaaaccgaagacgaattctggaagattcgcgacgaatacaaaagcaacaacgcgaatgccaactgacggtattacgcattaacacaacgcgtgcatcgcgatgcttatcgccccggccacgacaatggtcggggcgaacggcgtcttaccggcgaatcgcgtatgcttctgcgggtcgaaccgtgtccaaatcgcaagccacagcagccccagcacactaatcgcaaaccaccagaacaccactggaaacaggccgaacatgcctacggccaagccgataagcaacgtcgtggtgacgtcgccgaatcccaaagcccctggcttgatgagcgcaagcgcacattgcagcacggcggataacgcggcgaacaacagagcctgcaatgccagaaacagtgaattaacggacaacgcatacgtgatgtccacaatgacctgcgccaaacaccctacggcgatccacatgcgtggaatgcgtcgtgcccggatatcctcaacgctgacggccattccacagagcagactcggcaggcaaatcatgtaccacataccgttaagatagtccacgaatcgtatttggcagaaaaggagtgttggcatgttgcgctggcagacagcaggtgaatcgcacggcgaagcgcttgtcgccatgatcgaggggctgcctgcgggcatccacgtcactactgaggatatcgtcggcgcattggcacgccgacgtctcggatatggccgtggtgcgcgcatgaaattcgaacaggacaaggtccgcatgctcaccggtgtgcgtttcggcgagaccatcggctctcccgtcgccatcgagatcgccaataccgaatggccgaaatggaccgaggtgatgagcgccgatccgcttgaccatgacattccgcgcgaaggccgcaacgcgccgctatcccgtccccgtccggggcatgccgatctgactggcatgcgcaagtacggtttcgacgacgcccgtccagtgctggaacgttccagcgcacgtgagaccgcgtcgcgtgtggccttaggtgaggtcgccaagcagttccttgaacagacgttgggcatacgtaccgtctcccatgtgctgtcaatcggtggtgctggcatcaccgacccgcagaatgcggtgctgccgaagcctgaggacctcgaagcattggacgcttcgccggtgcgcacattggataagacggccgaacagcagatgatcgcacgcatcgacgaggccaaggagaacgccgataccttaggcggcgtgatcgaggtcgtggtatacggcgttccggctggaatcggcacgtacgttgaatcggaccgcaggctggacgcggcattggccagtgccgtcatgggcgtccaggccatcaagggcgtggagatcggggacggtttccttgaggcgatgcgtcccggctcccaggcgcacgacgaaatggtggttggcgacgatggccgcatcacacgtctgagcaatcgtgcgggcggaatcgaaggcggcatgtccaacggccagccgattgtggtgcgtgccgcgatgaagccgattccatccattccaaaggcgcttcgcaccgtcgacgtcaccaccggcgaggcggcccaggccatcaaccagcgttccgacaacaccgccgttcccgcggcggccgtcgtggccgaggcgatggtgcgcctcaccatcgctcaatacgtgctggagaagttcggcggcgacagcgtggccgaaaccaagcgcaacgccgaatcctatgtggcgtcctggccggagcacatgaggtgaccgattcgatggctggaatgcgtagacccgtcgccgtcatcatcggcatgatgggcgcgggcaagacccgcgtcggcaaggaagcggcgcagatgatgcaactgccgttcgccgacgccgacaacgagatcgaacatgatgcgggaatgaagattcccgaatatttcgaaaggtacggcgaaccggagttccgtaagctggaaagcgacgttgtgcttgacatgctggaggatttcgacggcatcttctccttgggcgggggcgctccaatgaccccgtccatccagcaggggctcgccgaatacatcgccgacggcggcaaggtcgtgtatttgatggccgatccgaaggaagccatggaacgcgccaaccgcggcggcggccgtccgatgctcaacggcgacgccaacgagcgttggaagaagttgtacaaggaacgcgacccggtgttcagacgcgtggccaatgtgcaggtgcgcacccacggacaaaccccgcaagtggccgcgagaaagctgatggaaatgatcgatcaacgtatcgtccacgtcaccggatccaccatcgaaccatacgatgtgtgcataggcgaaggtgtgatgagccagcttgcgcaggtgctgggggacaagcctgccaaagtggcattgattcacacccaggcggtgcaacggcattccgaccgcgcgcgcacgctgttgcgccagtccggttatgacgtgcacgacatcgtcattcccgatgctgaagccggcaagaccatcgaagtggccaacggcatctggcagcgtctgggggaggaaggcttcacccgttctgatgcgattgtcggtctcggcggtggcgcagccaccgatctggccggtttcgtggccgccacatggatgcgtggcatccgctacgtcaactgcccgacctcgctgctggccatggtcgacgcctccaccggcggcaaaaccggcatcaacactccacaaggcaagaacctcgtcggctcgttctatacgccggccggcgtgctcgccgacatgggagcacttgcctcgttgccgaacgacatcttcatcgaaggtctgggcgaagtggcgaaatccggtttcatcatggatccggagattctgcgcatgcttgaagaccatgccgacgagctgcgctcgttcgacggttcgacgttccttgactccgatctgaaggatgtggtcgccgaactcatcgaacgtaccgtgacggtgaaggcgtaccatgtgtccgccgacctcaaagaagccggattgcgtgaattcctcaactacggacatacgcttggccatgccatcgaaaaactcgaacacttccgctggaggcacggcaacgccgttgcggtcggttgcgtctatgcggccgaactgtcccatctgctcggctacatcgaccaggatctggtcgactaccatcgttcgctgctcggctcgctcggcctgccgacatcatggaacaatggcagctgggatgatgtgctggcgctcatgcaccgagacaagaaggcccgcggcaacaaactgcgtttcgtcatactcggctcgctcggccatcccatccacctcgaggatccgccggcggacgccgtcgaggaggcgttccgacgcatccagcggtaggacgcaatcgcaagaacgaacacaaaaggaagcaatatgaccaaagtagtggttgtcaacggaccgaacctcggccgtctcggagtgcgccagcctgacgtatacggcaagcaggatcttgagaccctgcgcaaactgtgcaccgaatggggtcatgaactggggcttgacgtggaggtgcgtcaaagcgacgacgaggccgagatgattcattggatgcatcaggccgcggacgagaaaacgccgatcgtgatgaatccggcggctttcacgcattactcctatggtttggcggacgccgcgcacatggtgatcgacgagggactgccgcttatggaggtgcatatctccaacccgtccgcacgcgacgagttccgcaagcgttccgtgatctctccggtggccaccggtaccatcaccggcatgggattctatggctacaagctggcaatcgaagcggttgcgcacttgttggaagaacgctgacatcgacattccgtcatggattcagccggatgcctgtctttaaggcatccggctttttcgtgccaatgaggacgacgcatatcccggtctccccggattggtatacagtgatattgcaaacgtatgcaaaccgggagcatggcgaagtgacgaagaggtcgatgactatgggcgcaatcgcaagaagaatcacacgtgtcattacggcggtcgtatgcgtcgcggtatcggtcggtgtctcagtcgccacgcttcacgtgccgacacgtgaaggcggcggggaacgtttcaatcccgcgcgataccgcagcgacgtgatcgcggatacggtcatcaaccacaccaccggcgtcgacaaaacacaagggaccggcaccgccggaagcccctacgacaataaaggctatttccctgaagtcggatacacgccatcggacttccatgccccctgttctatctggacgtaccgcgacgccgaaagcgtgtggaactgccaggtatcgggtttgcaggaccttgatacatcaagcccgcacgtgcgcgacgtgctgtctgactattttgtgaagcttctcgactacggcgtcgccggattccgcgtggatgccgtcaaacacatgcctccggaagacgtgctggccatcaagaaactcgttgcgaagaaatccggacgttccatgaacgacatctggtggacgcaggaagtgattggcgacaatgcggaagccgccgaaatccaaccgaggaactatctcaaaaccggccaggtgaacgaattccagtacgcatatcggcttaagtccctgttctccaactcgctggcaggcggaagcctgtcgatcaaagacattccgcagaacatcaccgacagtggcaaggccagcgtattcgtgacgaattgggataccgaacgcaacaacatgacgctcacctacaaggacggcgacgcctaccggctagcgaacgcgttcatgctggcctacccgtatggcgcccccaacgtgttctccggatacgaattccatgacaccgactcgggagcttcaggcgccactgcgaccagcgtgcccgatattgactgctccaaagactccggctggagctgcaccgaacgctggcctgacgtgcacggtatggtcggctggcataatgtcgcaggcgacgcgccgctctccgattggcaggatgacggcgacaacatgatcgccttcggtcgagggggacgtgccttcatcgccatcaacaattccgtgcgcacacgtactgtgacgtaccacacggctttgccggcaggggagtattgcgatgtctacgcttccgccgactgttccggcagcgtgcatgtgcgtttcgacggggatgccacactgacggttcctgccggtagtgcagtggccttccatatcgccgcgacaccgtataccgtgagacaatgattgcaatcgtttgctgttttttgcagctatttctgaatgttttctgcttgacttgcagaaaaaaattttgattgcagcaacaggttgcacttcggcatatatgaagtgcatgtgcagcagagggtcacgctgtttcattgccacgcgcagccattgacatacaattaactctgattcagagtgtaaacgtatgcatattcatcgtcgagtggattctgaatcatccgcgtggatgcggatgtccatggcgcatacgttgccggtcgcggcgcctgccatgggcgcttgaaccggcctcacagatgagaacggagaacgatggtcgttcagacgaaccgtccattaggccgtgtggtggcgatgggcgtcaccgcggccatggcgtgcgcttcgttggtcgcggcaccgatcgtggcccaggcgcaatccaaaacgcaggccaatcaacagaaagatgtccaggtgattgcgttccagcagacgtggaacacgatcgccaaggaatgcaccaacacctatggtccggaaggtgtggcctatgtggaggtctcgcctccgcaggaatccatccaaggcacgcagtggtggaccagctaccagcctgtgagctacaagctcgactccaagctgggcacggaagccgaattcaagaacatggttcagcagtgctccgcggcaggcgtgggcatcatcgccgatgtggtgctcaaccagaccaccggcgccgacgtggccgccggagaccagaagggcgtggccggcagcgaatacaacggctccaccggcagctacccgggcttcgccaccaagcagtacccggacggcatcaccgccgccgacttccacagctgcgacaagaacatctccgactacaccaatcagaaggaagttcaggaatgccgcctgagctccatgtgggacttcaactccgaaagcgagaaggtgcaggacatccagtccgactacctagcctcgctgtggaacgccggcgtgcgcggcttccgcatggatgccgtcaagcacatccacactgacagcatgaaggccatcaaggagaagttcgccaagaaaatcggcaagaacgccaacgacatctactggattcaggaggtcatcggcaacgcctccgaggccgcgggcatccagccgagcaactacgtgcagaacggcaccgtgaccgaattcggcttcaaatccgagatgaaccagaccttcaaggacaagatcgccaacctcaaggggctgagcgatcgcctgagcaaggatctgtcctccgaggacgccaacgtgttcgtcaccaactgggacaccgcccgcaacgagggtgcgctgacctacaaggacggcgccaagtaccagctggccaacgcgttcatgctggcctacgactacggcaccccgcgcctgctctccgactacaagtgggacgtcaacgacaacggtgcacccggagcgaccgcgacctccgtgcccgacgtggatatggacaaggcatgctccaccaacgattccgattggaactgcgagcagcgctggacctccacccgcggcatgatcgccttccgcaactatgtcaacggcaccaaggtcgccgattggcaggatgacggcggcgacaacatcgccttctcccgcggagccaagggcttcatcgccatcaacaacggcaagaaggacaaggacgcctcctacacgacatccctcgccgacggcgaatactgcaacgtgtacgccaccatggactgctccaagaccgtgaccgtcaagggtggcaaggtcgagaccacggtgccggcgcactccgccatcgccctgtatgccggtgctaccaaggcctcgcaccccgcagcctccgccgccaccgatccgtccgatcccgacgtgagccaggaggaggatgacgccctgcccgacgacagaagcgtcaccatctactacaagcccgccaactctgagtggaagaccccgaaggtccattacggcctcggcaacgattgggagcagccggaagccgacatgaccctcgacgcgcagggttactacaccgccaccatcaacaccaagggcaaggcgatcgacttcgtgttccacgacaaggacaccgatggttgggagaacccgaagggcggcggcaactaccatgccaacgtcggcatcacccacgttggcgtgagcgatcaggccgcaaccgtcggcaaccccgaatccatcggcggcaagacccgtctcgtcgtgcactacaagccctccagcgcctcggacaaccgcggcgtgtacgtgtggggcaccgatgtgaacggcggcaacatggacgccaagcaccacgccttcaccggcactgactgctggggcaaggtcgccgtgctcaatttcgacggcaagtacgacaagttcggcttcctcgtcaccaccagcgattggaacaagtacggcgccgaccgtagcgccaccgtgagcgccgacggcaccgccgaggtgtggatcgacggcaccaagtacccggaccagggcgaggcgaccactgtcgagacgcttgattcggcaccggccgattacgcctgcaaggccaacaccgtcaaggtgaaggtgcactacaaccgagacgacggcctgtactacaacgccgaggacaccagcaccactgtgccgcagtgggatatctggacctgggcatccaattggaacggcggtgccgccaccttcaccacccatgacgattggggcgagatcgcggagtactccttcaccaactacacctactacaacaacgacggcgcttccgatatcggcatgctgcgccgttacggtaaggacgcatggaaggccaaggacccggacgacgccgatcacaagatcccgtccaacgcgctcgtgttcgacgccgacggcaacgcctccgccgaagtgtggctgctcggcggcgacgccacggtgtatacctcccgcccgtccctcggcgcgaccatgaagtccgccgagatctccggcaccaaccagctgtccgccaagctttccaagaaggtctccacggatgacctgaaaggcaaggtcaccgtcacggacgccgacggcaaagccgtcgatgtcaagagtctcaaggccgacggcaccaaggtgatcatcaccgccgacaaggatctggacgttcacggcaagtacaccgtcgagatcaagggcttcggctcccagaacgccatcgccggttcggtggtccgcaccgacgccttcgacaggaagtacgcctacagcggcgaggatctgggcgcgaccttcaccaagaagcagaccggcttcaaggtgtgggcgccgaccgccgccaaggtcgagctcatcacctacaagtccgccgacccgaatgccgagatcgatcagaccatcgacatgaccagtgaaagcaagggcgtgtggagcgccacggtgaagaagcttgcctccggcaccgcgtactcctacaggctcaccttcgccgacggcacggtgaacacctcggccgatccgtacgccaccgcggccgtcgccaacggcgagcgctccgtagtgctctccaagaaggccatgggcaaggcgggcaagcgcatgccggccttcggcaagaccaccgacgcctccatcgccgagatgaacatccgcgacttctccatcaacccggcctccggcatctccgccgacaagcagggcaagtacctgggcgtggtcgaatccggcacgaagaccgccaagggcgcgacctccggcctcgactatctcaagtcgctgggcgtcacccacgtgcagatcatgccgatgtacgactacggttccgtcaacgagaccggcgacctgagctacaacgccgatggcgcgcagaactggggctacgatccggagaactacaatgtgccggaaggctcgtactcctccgatccgagcaacccgagctcccgcgtcaccgagatgaagcagatggtcaagggcctgcataagaacaacatccgcgtcatcatggatgtggtgtacaaccacgtctacaatgccgcgaaccattcgttcaacaagacggtcccgggctactacttccgctatgacgacaacggttcgctcgtcaacgactccggttgcggcaacgacaccgcctccgaacgtgcgatgatgcgcaagtacatcgtcgactcggtgacctactgggcgaagaactacaacatcgacggcttccgattcgacctcatgggtctgatcgacaccaagacgatgcaggaggttcgtgctgccctcgacaagatcgatccgtccatcatcgtgctcggcgaaggctgggacatgaactccacgatggacaagagcgagatgaccatccagccaaacgcctaccaggtcgcttcggacggcaccaacaacggcatcgcgttcttcaacgactcgatccgcgacggcctcaagggttccgtgttctccgacaccgacaccggtttcgtctccggcaaggccgatcaggaaagcctcatcgcccacaacgtgctcggctgccagtacgacgccgacgccatcaccacctgctggaacggcaatgcgcaggaccactacgcggatgccggtcaggtggtgaactacgccgagatccacgacaacatgaccctgtacgacaagctcaggaagtccgtgcccacggatgacgaggccaccaccgaggcgcgcgccaagctcgccgattccgtggtctacctgtccgaaggcatcccggccatccagctgggccaggagttcctgcgcaccaagggcggcaacggcgacagctataacgccggtgacgaggtgaacgccatcgactgggatcgcaccacgcagtatgcgggctccgtcgactacgtcaggggcctgatcaagctgcgcaacaggatcgctgccctccgccagaccagctacaacgacatcaacgccagcgtgaccatgctcaagtccgccaacggtgtcgtggcctatcaggcaaaggactccagcggcacctacgtggtgatcttcaacgccaacaacgatgccgccgccatcgatggcgtcgaggccggcaagtacgaggtgctcgccgcaaacggcaccgtgtacggcgacgacgacgtcaagagcgtcaccgtccgcaagggctccgcatacaccgctggcgcactgtccgccaccgtgctcaaggtcgcctccgccgacgacgtcgttcccgtgattagcggtgtgaacgagtcgacgaccatcaccgtcggttccaagttcgatccgatggcaggcgtctccgccaccgacgacatcgacggcgatctgaccgacaagatcaaggtcgagggcaccgtggacgccaataaggtcggtgactacaagctggtctactccgtgaccaactcccgtggcaagaccacgaccttcacccgcacggtgcacgtccagaagcaggccgtcaccccggccgccgataagaacaatggcaatgccaatggcaagatcaacggcaaggccgacaatacaaaggaagacgcggagaaaagcgcggcgcagagcccggcaacaggctccaacgtcgccggaatcgccttggccgtcatggtgctcgccgttgcggcgggcgtgttgatcgtcctccgcaggaaggaggccggcgaccgataaaatcgcaatcgtctgactgtatttcctgaatttccgaaaggtgggaccgcggagcaatgcggtcccgccttttcgtatcacgatggaacacgccgcgtcttgcgccgctgatagactgaagttccatggttagaagacaacatggcaattctcaagaacacgtcaccaaacatattttcgtcaccggcggcgtagtctcctcccttggcaaaggcttgaccgcctcctccctcggccgactgctccgtagccgcggcatcagggttttgcagcagaagctcgacccgtacatcaacgtggatccgggcacgatgaaccccttccagcacggtgaggtctatgtcaccgaggacggcgccgaaaccgatctcgacatcggccactacgagcgtttcctcgacgtctacctgagccagaaggccaacgtcaccaccggccagatctaccaggaagtgctgcgcaaggaacgcgccggcgaatacctcggccagtgcgtgcaggtcatcccgcacatcaccaacgagatcaagtcccgtatgcgtgcccaggcgtcggacgacgtcgacgtgatcatcaccgaaatcggcggcacggtcggcgacatcgaatcccaaccgttcttggaggccgcacgcgaggtccgccgcgatctgggcgccgagaactgcatgttcgtgcacgtctccctggtgccgtacattgccgccgcccacgagctcaagaccaagccgacccagcattccgtcatgatgctgcgccagctcggcatctccccggacgcgctcgtgctgcgttccgaccggccgctcaaccagtccatcaaggacaagatctccctgatgtgcgatgtggactccgaaggcgtcgtcaactgcgtggacgccccgagcatctacgacgtgccgaagatcctgttcaacgaaggcctcgacgcctacgtggtccgcgagctcggcctgccgttccatgacgtcgattgggacgaatgggaggatctgctggagcgcgtgcaccatccgaagcacgaggtcaacgtggccatcgtcggcaagtacatcgacctgccggacgcctacctgtccgtcaccgaagccatcaaggccggcggcttcgccaactgggccaaggtcaacgtcaagtgggtggccgccgacaagtgcgccaccgaagaaggcgccgcggcggccctcgaccaggtcgacggcatcgtgattccgggcggcttcggcatccgtggcatcgacggcaagatcggcgccctgcgttatgcccgcgagaacaagctgccggctctcggcctgtgcctcggtctgcagtccatggtcatcgaatacgcacgcgatgtcctcggcatcaccgacgcgaactcctccgaattcgatccggattgcgccaacccggtcatcgccaccatggaagagcagaaggacatcgtcgccggcaagggcgacatgggtcacaccatgcgtctgggctcctacccggcggaactggaggaaggctccattgtcgccgaactgtacggcaccacgcatgtcaccgaacgccaccgccaccgttacgaggtgaacgtggcctacaaggatcgtctgcgcgaaggcggtctggtcatctccggccagagccctgacggcgaactcaccgaattcgtcgaactgccgcgcgaggtgcatccgttctacgtggccacccaggcccatccggaattcaagtcccgtccgaccaagccgcatccgctgttcgcgggtctggtcaaggccgctctggaccaccagcaggcgcgctgagacgatttgagcgcataagctcgattcatcgcaaagcggaagaccgaatctgcatggtcttccgcttttttgtaaggcaaatcacgggcgaatactgtcgaatttcgaataaggtctagtgtttcgctgtgtgttctgttaggttgtcataggtatcaatgagtgaatggaggcagcgtacggtggcagagaaccaagcgtccaacgccgcggccgacgtggagatgagccagtatgtggctgatcgcacgcgcgtgaacgaagacaagatcaagcaggatgacgagatcatcgagcaattcggtgactacaactacggttggcacgatacggacttcgccggcgaggcggcgaagaaaggcatcgacgagaacgtcgtgcgtgccatctccgccgacaaacacgagccggaatggatgctggaaaagcgattggaagggtatcgcgatttcatcgaccgtccaatgccgcagtggggcgtcgatttgaaggacttcgacgccgacgatttcaagtactacgtcaagccgatcgacaagcaggccaccacttgggaggaactgcccgacgagatccgctccacgtacgacaagctcggcattccggacgcggagaaaagcagactcgtctccggcgtcgccgcgcagtacgagtccgaggtcatctacaattcaatccagaaggatctcgaagagcagggcgtcatcttcgtcgacaccgacaccgccgtgcaaaagtacccggaactcgtcaagaagtatttcggcaaatgcattccgagcaacgacaacaaattctcggcattgaacaccgccgcatggtcgggcggctcgttcgtatacgtgccgaagggtgtgcacgtggacatcccgctgcaggcctacttccgcatcaacacgccgaatatgggccagttcgagcgcacgctgatcatcgctgatgaaggctcctacgtgcattacgtggaaggctgcaccgcgccgatctattccaccgactcgctgcattccggtgttgtggagatctttgtcgaaccgcatgcccgtgtgcgttacaccactgtgcagaactggtcgaacaacgtgtacaatctggtgacgcagcgcgcctacgtgcgtgagggcggcaccatggaatgggtcgacggcaacatcggctcgaaagccaccatgaagtatccggcatgcatcctcgccgagccgtacgcgaaggccagcaccatgtcgttgggtttcgcaggcaagggccaatatcaggacacgggcgcgaagatgattcacctcgccccgcataccagctccaccatcgtggcgaagtcgatttcccgtggcggcggacgttccgcataccgtggcctcgtcaaaatcgtcaagggcgcggaagggtcctccaattcgacggtctgcgacgctttgctcgtcgacgaattcagccgttccgacacgtacccgcatgtggatgtgcgtgaggacaacgtctccatggcgcatgaggccaccgtttccaaggtctctgaagaccagctgttctatctgatgagccgcggcctgtccgaagacgaggccatgggcatgatcgtgcgcggcttcgtcgaaccgatcagtcgcgagctgccgatggaatacgcgctcgaattgaaccgtttggtggaattgcagatggaagggtcggtgggctgatcaccatggcacaaactcaggaaatcaatatccccgtcgcggatccgtccgatccgtacgcgaacccggcggccatgccgtcgtccgcggaccgcgctccacgctcattcgacatcgaagcgttcgccaagccggaccgcaaacaggaggactggcgctacacgccgatagagcgcatcgaggagttcttcgatgtgttcgaaccatccaatgaaacgcaggtcaccgtttccatgatcgacgggtcgccgcttgccgaaggcgtcacgtatgccgaaggcacggtgggggacaccggcacaggcatcgtctccaagccgaacgaccgcgtgtccgcagtcgaatggaattccggcaaacgcgctggaatactgaccatcgacggtgagatcgaccagccggtgctcgtcaaaatgcatggcaccggcaaggacctcgacgcgttccacctgtcgatcatcgcagccgaccgcgcccatgccgacgtggtcgtcgaacatgacggcgacgcacgtctcgccgaaggcgtggaaatcaccacaggcaaggactcccacatttccaccaccttcatccaggaatggaacaaggactccaaacacgtcggcaaccagcgcatccacgtgggcgaggaggcgtccctgcgccattccgtggtcaccctcggtggtgatgtcgtgcgcattcgcatggaccaggacttcggcggcgaacagggcgacctcaacatgctcggcatctacttcgtggacccggacgagcatatcgaacaccgcacgatggtggtgcacaaccatcccgaatgcaagagccgcgtggtctacaagggcgcgctcgacggcaagggcgcgcactccacatgggtcggcaacgcgctgatcgagcctaccgcgccaggcaccgactcctacgagctcaaccgcaatctggtgctcaccccaggtgccatcgccgattccgagccgaatctggaaatcgaaaacggcaacatcatcggtgccggccacgcctcatccgtcggacgattcgacgacgaagagctgttctacctcgaatcgcgcggcatctcggaaaacgaggcccgcaagctcgtggtgcgtggcttcttcggcgagctcgtcgaggaaatcggcattccggcgatttccgagcatcttatgaacgtcatcgacaagcgcctggcccgcggcgaaagcgacgcgatcgcacaggtattggaagagaaataatcgtcaggagaaaccatgtcaacccttgaaatcaaagatctgtacgcgcacgtcgaaaccaaggacggcatcaagccgatcctcaaaggcgtgaacctgaccgtcaactccggtgaaacccatgccatcatgggccccaacggttccggcaaatccaccctggcatacacgctggccggccacccgaagtacatcgtcgactccggccaggtgctgctcgacggcgaggacatcctcaagatgaccccggacgagcgagccaaggcgggcatcttcctggccatgcagtacccggtcgaagtgccgggcgtgtccatgaccaacttcctgcgcaccgccaaaaccgaagtggacggcaaggcgccggccatccgtacatggacgaaggaactgtccgaagccatgaagcggctcaagatggacccgaagttcgccacccgttccgtgaacgaaggcttctccggcggtgagaagaagcgcgcggaagtgctgcagctcgaactgctcaagccgaagttcgccatcctcgacgaaaccgactccggcctcgacgtcgacgcgctgcgcatcgtttccgaaggtgtgaaccgtgccaaggaagccaaccagttcggtatcctcatggtcacccactacacccgcatcctgcgttacatcaagccggacatcgtgcacgtgttcgctgacggccacttcatcaagaccggcggtccggaactcgccgacgagcttgaggagaccggctacgacgcatacctgccggaaggctccgattcggaaagcgcattggcatgaccgatttcgcagcgatccgcagccaatttccgattttcgaccaggaaatccacggccatccgctggtatacctcgattccgccgcgacatcgcagaagccgcagtgcgtgatcgacgcggaatcggacttctaccgcaccatcaacgccggagtgcaccgaggcgcgcatgagcttgccgcgcgtagcaccatggcgttcgaggatgcgcgcgccaaagtggccaagctggttggcgccgattcggcggaaggcgaagaggagatcgtcgtcaccgccggcgccaccgcaggactgaacctgttggccaccgcattcggcaacgcgtcgcttggacgcgggggagaggccgccaagcgtttcgcgttgaaaccgggcgatgagatcgtcgtcaccaaggcggaacaccattccgtgctgctgccgttccaggaacttgcgctgcgcaccggcgccacgctcaaatggttcgacttggacgaggaaggccgtgtgcgttccgacaccgcgaacgaagtaatcaccgaccgcacgaagatcgttgccgtcacgcatgtgggcaataccacaggagcgattaccgacatcgcgccgattatccgccgcgcccacgaggtgggtgccgtgttcgtgctcgacgcatgccagtccgtgccgcacctcaaagtggatttccacgctttggacgtcgatttcgccgcatggagcgcccacaaaatgtatggcccgaccggcgtcggattcctctatggcaagcgtgaaatgcttgaggcattgcctccggccaatttcggcggatccatggtggagcttgcctggatggaccaggaagcccagtacatggagcctcccgcacgattcgaagcgggcacgcagccggtggcacaggtcgtcgccgccggtgtcgccgccgaatggctgatgaacatcggcatggaaaacctcgaggcgcacgaacgcaccatcaccgacgaactgctcaaaatgggcgatatcgacggcatccgaatcctcggaccccgttccaacaaggagcgcatcggtaccgtcgcgttcgaagtcgaaggcgtgcacccgcacgacgtcggccagttcatcgacgcgcagggcatcgccatccgcgtcggacaccactgcgcgcagccggtgcaccgacacttcggcgtgtatgcctccaaccgcgcgtccagcggcatctacaattcggtcgaagacgcgcaggccctcatcgaggcgctcggcaaagttcgtccgttctttggagttgagtaacgaaatatgagtgattttgagatgtccggaagcgaccttgagcagatgtaccaggaagtcatcctcgaagccgcgaagaacccgcacggcaaggagcatttcgcacctgacctcgcttcggaaaatgcctcgcatgccgccgaaaccacggtgcagaccagccacgaatactgcacgccgggagaatcgcaccaattcaacccgacctgtggtgacgaggccaccatccatgccgaagtctccgatgccgagccatacaccatcgaacggctcgtatgggatggccacggatgctccatctcccaagccagcctgtccgtcatggtcgatctcgtcgaaggcaaaaccgtggacgaggccatgaaacttgccgaaaccttccataagcttatggagtcacgcggcaaaggactgaatgacgaacaggccgaggaatccttggaggacggcatcgtcttccaaggggtctcccagtatccgatgcgcatcaaatgcgcgctgctcggctgggagggcatgaaggacgccgtggccaaggctctggccgcgaaagcctgagccttcaactcggcgtttggaaaaacactagtgacaaaccccaagcgacgcgctattcttgctcaacagatacaagcaacgtccatcaacagtttggagagacaatgagcgacaccctggtacccgaaccgcaggcgtcgatcttcgattccgtgaccaaggccttgggcaacgatgaggacgcggcccgtcgcgtcatgctcaatccgaacctggccaaagggttcaaggacggcaaaccggtgaacaaggaatccaaaaaagacgggcaggacatttgcggctgcggcaatcatgccgacgcgtgcggatgctcccaaccgcaggatgacgacattccgctgaaagccgtcgacgatatcggacgtgccacggcagctgacgtgaaagaagccctgcaccaggtcatcgacccggaactcggcatcgacgtcatcgaccttggtctggtttacggcatcgaaatcgacgaactgggccgagccatcatcacgatgacgctcaccacgccggcctgcccgctgaccgacctgatcgaagacgaatgcgccagcaccctcgccggtctcgtcgaagaattccgcatcgactggacctggcaacctcgttggacgatggacaagatcacgccggaaggccgtgaccagctcgccgcgctcggcttcaatttcgacaatctgccgaaatactgacgtttgctgcggttgccgtgcagtgaaccgcagccgccaaacgtaagaaaaacggaacaacatacgaaaggcgcgcctcccgaacggggaagcgcgcctttcgtattacgacgtatgtcagtcgtcgaccacggtacccttcggcaccacggtgatgccttccggcgtgacggtgaagccacgcgccaaatcatgctcggtatcgatgccaacggtcgaattctccgtcaacacgacgttcttgtcgagaatcgccttgtagacccgcgcgcgacggttgacgaccacaccgtcgaacagaatcgaatcgacgacctgagaccacgaatggatgcgcacgttcggcgacaggacggaatggtgcacctcgccgccggaaacgatgacgccgggggagacgatcgaatcggtggcatggcccaggcggtcgcggccggcatgcacgaacttcgccggcggcaggttgccggacagcgtgtagataggccattcggtgttgtacaggttgaactccggcacataggagatcagatccatatgcgcatcgtagaactgcttcagcgtgcccacgtcacgccagtaggcgtggtcggtcggtgtggctcccggaatctcgttggaattgaaatcgtagacgccggcctcgttgcgtgccgcgaaatacggcgcgatgtcgccgcccatatcatgcttcgtatcctcggccttctcatccaacgaaagcgccgcgaacaaggcatcggtgttggccacatagttgcccatggaggccaggatggaattcgggtcgtccggcagtcccgtggtggtctgcggcttctcctggaagctcttgatcatattcggatgatcgggatcgacctcgatcacaccgaactggttggactggctgatgggctgacggatgccggcaacggtgaattccgcgccggattcgatgtgctgctgcaccatctgctggaaatccatgcgatagacatggtcggcgccgacaatcaccacgatgtcgggctgcacgtcctcaatgatgttgatggtctggtagatggcgtcggccgagccgagataccaatgcttgccgagacgctgctgcgccggcacaggggagacgtagttgcccaacagcggcgagaaacgccatacagtggagatatggcggtcaagcgaatgggacttgtactgggtaagcacgaccgtctgcatgtagccggaattcaccagattgctcagcggaaaatcaatcagacggaacacgccgccgaatgggacggcaggcttggccctgtccctggtcaatggcatcagacgggtgccctcaccgcctgccagcacgatggaaagaatctttgggttcttcgccatgggaactcctctctgagagcgtcttgcgacaccgtacgcacggtcggtccgcttcatcacgaaaccgcttacgcacactatgattgcataaattcagcaaatcgcaaggagtttgcagcgcgagtcttgaaaatttccagttcgtttcagcaacgtttcaccatgcgttcatgcgcgtctcacgcatgatggtccactcgacgcgtcgcatagaaggcgaccgcgcttgatgcggcgacattgagactgtccacgccgtggctcatgggaatcttcaccgtaaggtcggcgcgggagatggtgtggtgcgacagtccatctccttcggtaccgaaaatcaacgcgagcttgtcaatatggtcgctttcagtctcggtgttgttgagacggcggaccaattcggccaaagaaatggaatcatcctcaagcgccatcgctacggtggtgaaccccagaccatgcagttcccgcatgccggtgaacggccaataatgcttgtcgtcccctccgatgcgcgtccacggcacttggaacaccgtgcccatggacacgcgtgccgcgcgccggtacaacgggtcgccacaggacggagtgacgagcaccgcatccacgtcgagcgccgcagccgaacgcatgagagcgcccacattcgtgtggtcgacgatattctccatgaccgcgacccggcgagcgccacggcagacctcttcgacgctgggcagggaccagcgtttcatcgcggcaagggctccgcgatgcagccggtagccggttagacgtttgagctgctcaggcgaagcgacatacacgggaatgccatcgccccaacgtttctcgatgacatcgaacatgccgctcatgccgtcgatccacgactcctcgaccagcagggaaatcggctcgcgtccagcggccagggcacggtctatcactttgggcgattcggcgatgaacaatcccttgctgggctccagcctgttgcgcagctggatttccgtgagattcacataagccgccacacgctcgtcgtcgatggagtcaagatgaatgaaccgcattgcccgtattccgccaatctttcgtcagatacaagaaaaccccttgtctccaaggggtttattccggtgtccggagcgggacttgaacccgcacgcctgtataaaataggcactagcacctcaagctagcgcgtctaccattccgccacccggacaggtgcgttgctcagcggcaacgaatgaaaactatagcagttgaaatccatgatgcaaatcctggcgtgtcgcgataggtccgatatgggttatgtggggttcctgataggctcggaagctatgactgatgccctttttctgcttgatacggaccatgacgacgtaccggtgaacagcgacgagctcaacgccggatggaggctgacgcttccctcatccgtacgcaggcacgccatccaggccatgcgattgaaggacggcgacgaactgcagctttccgacggcaggggattgcgcatccacgccgtactgcgcgacgcgcagcagggaatcgcggaagtgctgcgattcggcaaggagccgcagccggtcaccaggctcgcgctggtgcaggctctcgccaaaaccggccatgacgagcaggcgatcgatatggccacgcagatcggcgtcgatcaggtgattccctggcaggccgaccgttccatcgccaaatggaaggcaggacgtactgacaaaaagtggaggcaggtgctggaatccgccaccgaacagtcgcgcagatcgtggacgccccagctggacgattgcgtgaccagcaagcaggtggtcgccatctgcaagcgcgcatgcgtgcatggcgacatggtgatcgtgctgcatcaagatgccacgaagacctgggaacaactggaaaccggtatcgccaaactgtccgatacgtgtctgaaggacggacgtccgcgcaccatatatgtgctcgtcggtccggaaggcggcatcagcgacgccgaagtcgaggcgttcacgaaagccggcgccgaagtgtgcgtgctgggaagcaacatcctacgtgcgtccaccgccggtccggtcgcgctgtcattgctcgcgcgagcattgggacgtttcgtctgatcccggctccattgcgtgaaattgccggaatcgccccgtttcctgctggtgtagcatggtagcgaaggtttttccaataccgataaggagcgttatgagcgacaaggattgcctgttctgcaagattatcgcaggtgagattcccagcgagaaggtgtacgaggacgatgccacctacgccttcaaggacatcaatccgaaagccaaggtgcacgtactgatcgtgccgcgcaagcactacgcgaacgtcgccgaactcgccaaagaggatccggcacagctcgcccacatggccgaagtggcgcagaaaatcgccgaccaggagttccatggcgccttccgtctgatcttcaacaccggaatcgacgccggacagaccgtgttccacgtgcacgcccacgtgcttaccggcgaaaagctcgacgaatagtccacatactgcctaccgccaataccgacatcggaagaggttctgtgcccaccactacacgcaccatcgcgataccccaacagcttgatccggtgaccgtgctcggccctgtggacgaggtgcttcgggaagtcgaacgtgcgttccccgacctgaccatcatcgtacggggcaaccgcatcgccatcatgtcgcattccagcaaatccgaatcccaagccgcccaagccgaacaggtggttgccgatatcatccaagccgcctataccgcgccgatggacgccgataccgtccgtcgcatgctcgaccagaacgtgcttaaaaatccggtccgcgccacacatcccggccacggccgcgtggtggaggaattgcgcatggccggcaggcaacagtcgcacgcgtcccatcgtgaggaaaccgcagacaggcggcgtcctcacgtgccgggcgtcatcaccttcgcgctcggcaaaccggtccgtgccaaaaccgccggacagatagcctacgtcaacgccatcgaatcgcacaccatcaccttcgccatcggaccggcaggcaccggcaaaacctatcttgccgtagccaaagcggtacgtgctttccaagacaggcaggtccggcgcatcatactgacccgtcccgccgtcgaagcaggggagaacctcggcttcctgccgggcacgctcaacgaaaaggtcgacccgtacctgcgaccgctgtacgacgcgctgtccgacatgctcggagcggaccagctcaagcgatacatggacgacggcaccatcgaagtggcgccgctcgcctacatgcgcggccgcacgctcaacgacgcgttcgtgatcctcgacgaggcccagaacaccaccgaacagcagatgaagatgttcctgacccgactgggattcaacaccaaaatggtcatcaccggcgacgtgacccaagtggatctgaccgtgccgaaatcaggtctggccaccatcgaacgcatcctcgacggcatcgacgacatcgccttcgcccacctgaagcccgaagacgtggtccgccacgcgctcgtgggcaaaatcgtcgccgcctacgacaggcacacggccatagcgggagaccacagcagaagcgcgcgtgccgcatcatcgcaaccattcgacgacaagaacaaggaaaacgcataaatgagcgttgaagtgacgaacgaaaccgcctggcagatcgacggcaaaatcttttccgacctcggcgtatgggtcatgagccagatgagggtcagcacacaatccgacctgaccatcatgttcgtggacccggatcccatcgcccaactgcacatgcgttggatgaacctcgaaggccccaccgacgtcatgagcttcccaatggacgaactgcgccccggagacggcggaaccgaaatggaaggcgtgctgggcgacatcgtgctatgcccgtgggtggccgcccagcaggcgctcgcggccggccacagcaccatggaggaaatgatgctgctgaccatccacggcatcctccacctgctcggatacgaccatgtcacacccgaacaggaacggcagatgttcggcttgcaacgccagctgctattgacgttcttcgcgcttcgacagggagccggcgcgcgggcgacgcttcccgccggcacgccggatgcgctcgccgaatgggaccgcgaacacggggccggcggcaaaacggccaaatgacggcatgatgcatcatccgacggtttcgaaagtgggggttgacgaaccatggaaacaacgactatcacgatgattgcgattctcgtcgtcatcgcattgctgctggtctggctgtcgctgtcgatggccgcgacggaaggcgcggtgggacgtgtcacgagggcaagtctgaacaacctcattcttgagattcagacggatacggaggcgtcgcaattcatacgcgacaagaagatcaaacgcatccacaaggtgcagcggctgatcgccgaccgctacgcgaccgccggttcatgcgcgttcttccgcatcacctgcaatgtgcttgacggtgtgttggtcgccgcgatcgcgtcgttgtgcgatgcgccgttatgggcgggactgcttgtcggcttcgtgttcgcgctggtggtcgcggtgatttcgctgctggtccgtccacgtagcgcgggcgcctccaaaccggtcgatctgatgctgaagcatgccgatgcggcgtcggtcgcggtggctttgacgccattcgctaaaatcggcggacagaaggatgcgaaacgtcattcgaatgatctgtcggacgatgaggagcttgaaaaaatccaactcgaacaagggcgcgccaccatagatcgtctggtcgaggcgaatgatttcgaccctgaggtttccgaaatgctgcgcaacgtattgacgttgtccgaaacgttgacgcgtgagatcatggtgccgcgcactgatatgatttgcatcgaacgcggggagacgctggagaacatgctgaaattgtgctcccgttccggattctcccgtataccggtcatcggcgatgatgtggatgatctggtcggcgtggcatacctgaaggatgccgtgcgcgccacggcgttcaatcccgcggcgatatcccgcgatgtcgaatccatcgtccgtgacccgatgctggtgcccgaatccaagccggtcgacgacctgttccaccagatgcagcgcacccgccagcatgtggctatcgtcgtggatgaatacggcggcatcgccggcctggtcaccatcgaagacaccatcgaacagatcgtcggcgaactggaggacgagcacgaccgtacccagcatgccgatccggaacaaatcggcgagaacaaatggagcatgccggcacgcacgcccatcgccgacttggaggagatcttcgaaatcgacatcgacgaggacgacgtcgacacggtatacggtctgctcaccaagctgcttggccgcgtgccgatcgtcggttcgacggccgtcaccaggggcctgcgcctgaccgcggtcgactccgcgggacgccgcaagaaagtgtccaccatcgtggtggaaccggcccacgtcgagggcgtggacgaaactgaacaacacgaagaccatacgaacggtgccgaagaggcatcccatgacgacaaggattccaaggacaagcatgactgacgcagatgtgaccgaaccggcttcccagcattccgacgccgaagcccccgttccatatcgttccggcttcgtcgcggtggtcggacgtccgaacgtcggcaaatcgacgctgatcaacgcgcttatcggcacgcagatcgccatcgcctcatcccgtccggagactacacgtaaggccatccgcggcattctgaccacagacaacgcgcagatcgtgctggtcgatacccccggtatccaccgtccgcgtacgctgctcggacagcggctgaacgatgtcgtcgacgaatcgctatccgatgtcgacgcgatcgccttcctgctgcccgccgaccaggaaatcggccccggcgacaaacgcattctgagcaggctgcgttctgatttcgccgtcaaacgcgacgacggcacattcaaatggaaggtgccgctgatcgccatcgtcaccaaaatcgacgaattggaccgaagcgctttgatcgacaagctcatcgaaatcaacgagttcgccgacttcaccgacattgtgccggtgagcgccctcgagcacgacaatctcgccgaagtacgcaacgtgctggtggagaacatgcccgaaggaccgcagatgtatccggccgagcaaatcaccgaagaacgtccggaagacaccatcgccgaactgattcgaggcgcgttcctggaggaattggatgacgagctgccgcattcgctcgccgtggtggtggattccatcgaatatccggaagacaacgacagcggcgaatcctacgcgggcaaggcgcaggtgattgtgtcgatctacgtggaacgtgattcgcagaagccgatcatcatcggacataacgcggagcatctggtacgcgtcaagaagaagctgcgcaccgcggtcaaccgcatcgtcgggcagaaggccaagctcgacctgcatgtcaaggtggccaagggatggcagtcggatcctaagcagcttgagaagctgggcttctaagccgcttaggatccgcttcgcggcgaagctgctcacttcgcctacggtcagcccactgggctgcccgtttgacggctcagccaagcagcttgagaagctgggcttctgattttttccgggtgggaacaataaagcctgccgctgtttatgcggcaggctttcttatgctctaagcttgttggtgctggatggtcacttcttcttggtgtacatttgcgtgttcagcagggtggcgtaacgcttgatcaccttcggacggatgaccttcatggaagcggtcatcaaaccgttctcctgtgtgaactcctccggcaggatgatgaacttacgcacggattcggcacgggacacgccctcattggcctgatcgacccacttctggacttcggcgcggacggccgcgttgctggaggcctcctccatcgacatatctcggttgagacccttgctttccagccatggacgcaacgcttcctcgtcaagcgtgatcagcgcggagatgaacggacgcttgtcgccaagcaccaacgcctgagagacgaattcgcaacgcttgatgacatcctcgatcgggccaggggagacgttcttgccgccggcggtgatgatgagatccttcttgcgtccgatgatgtacaggaagccatcgtcgtcaatgcggcccaagtcgccggtcttgtaccagccatcctcggtaaaggaatcctcggtggcctcgccgttcttatggtacttcgggaacaccgaagcgcccttgacctgaatctccccatcctcggcgatacgcagctcgaaaccagggaacgcgatgccgacggaaccctgatgatacggcacgccaagcacgttgaacgcgcacggcgcggtggtttcggtcaatccgtagccttcgtagaccggcacgccggcaccacggaagaacgccaacaactccggatcaagcggcgcaccgcccgcgacgatccacttggcgcgtccgccgagcacctcacgcagcgaggcatagaccaccggatcgaacgccgcgcgacgtgccttggtaagcgttccggtcttccccttggtgctgacttccttcatataattctgcgcggcgaccacggctgcggcgaaagcaacgcccttggcgccatgaccggccttctgggaagcagcgttgtacaccttctccagcacacgcggaacaacgatcatgatggtcggcttggccacctgcaaatcggcggtcaatgtcttgatgccctgcgcgatataaatatgcagattgcttgctacgcagatgtagttgatggcacgggcgaaggaatgcgcctgaggcaggaacagcaggacggtgttcttcttgtcatgcagcagttccggcatataatcgggcagattgaacgcggtggcgcaataatgctcatgcgtcatctccacgcccttcggcgcggcggtcgaaccggacgtgtacacaatggagcacagatcggtcttctgcacggaatcgattcgcgcatcgagcgcctcatcgctcacaccggagccatacgccttgatctcgtcaagaccaccggtctcgaagcagacgatgtgctccaaagtcgggcattcggtttcggccccgtccgccttcgccttcatatcagtggtttccacgaccagcagacgcgcatcggaattgttgacgatattgcggatctgctcggcggaatcggtatcgtaaatcgtggcgagcacgccgccgcaggccatgacggccgcgtcgaacacatcccaatcgtaggaggtgcggcacatgaaagccacgccatcgcccttcttcaaaccataatgcagcaagcccttcgcgacggcgcggatgtcggcgagcgtctcatttgcggtcttggtgtgccaatcgccatcttgcttgaacgtgtacaatggttcgtcgcccatacgagcggcgcggtcggcgtagatatcgtagatggaggtgccttcgtctagcggcggattgccctctgtcttcgtggtcaacagtccggtttcagggtcaaggaacgtggtggacgggtatcccggtccccattcagcggtgtgcggcagctcgatatggccatcgggggagaggatgctgttcgggtcgttgtaatccggtgtattgccggaatcgtcgctgaccgggtgcacgaaatcgttgcccaagcgcaacgccttccttgcgagattagtggcctgcttgttcaacgaggtgatgatggacacgtgactctcctacgtatataaacggtatctaaagaaggaatgatagcccgtcgcgcgcgacacgtcaccttacggtagcgtaaggtgacaggccatcagggaaacgggcggcgcatgccggatacagcccgtgattcgaaagatgaacgattgcggccgcgatgttgccgtgtacgttacacttgggcgctgtatctgttcattagatttctttaacgaggaagaaagggcacctatggctgaaaaagctgaagccaccgtggtcttcggagttctcaacgagacttccgaacacgagtcccgtgttgctctgacaccggatatcgtaacgaggttgcgtaaatcaggtgttacatgtctgattgagtccggtgcgggcgtcgcatcgcactacgttgatgaagattatacgaaggcgggcgcgcaggtcgtctccgccgacgatgtgatcgcacgcgccgacgcgctgggttttgtggatcgtccaagcaatgagctgctcgcccgcgtcaagcagggcacatggatcattggcatgttgggatcgttcaccgatgccgattacgtcgccgcgatcgagaaggccggtctggtcggcgtcgccatggaaaagctgccgcgtcagctgagctccgcgcagtccatggacgaaatgacgtcgcagaactccgtgatgggctacaaggccgccatcgtggcagccaacgcgtacggttccttcctgccgatgatgaccaccgccgctggcaccatccgcccggccaaggtgcttattctgggcgccggtatcgccggcctgcaggccatcggcaccgccaagcgtctcggcgccgtcgtcaccgcgtacgacgtgcgtccggcatccaagggcgaagtcgaatccttgggcgccaagttcctcgaccttggtcttgacttctccaagggccagggcgaaggcggctacgcacgcgcgctgagcgccgaagagcaggcccagcaacaggccgcggtcgatcagaaggccgccggcttcgacatcgtcatcaccaccgccaaagtgccgggacgcaagcctccggtccttctgaccaaggccggtgtggccggtctgcatcgtggcgccgtcatcgtcgattgcgcggcaagcgaccttggcggcaacgtcgaaggctcctccgtcggcacccaggtcaccgacaacggcgtgaccatcatcggcgccccgtatctggccagcggcgtgtccaccaccgcatccaacctgctgagccgcaacgtggccgacgtgctggcgcatttcgtgcgtgacggcaagctcgccatcgacctgaacgaagagctcgacaacgccatggtcgtggccggccgcggcgaggaagccaagaaggaagaggagtaaagcaatggatatcgtcgttgcgatcacactgttcgtcctcgcgctgctcatcggcgtcgaggtcatcggcaaggtgcccgccaccctgcacaccccgctgatgtcgggcgccaactccatccacggcatcgtcatcgcgggcgtcgtcatcgtcgccgcgcacgccaccagtccgctcgcctgggtgttcatcttcctggccgccgtgctgggcacgatgaacgtcgtcggcggctacgtcgtcaccgaccgcatgctggagatgttcaagtccgacaagggcaagaagaaggaagaggaggccaagtaaatgggtaccctggccgaaatgctgagcacgccgctcggcgtcatcgaatggttcgtctatctgctggccgcagtgatgttcgtcatcggcctgcacctgatgaactccccgaagaccgcccgcaagggcaacatggtctccgccatcggcatggtgttcgccgtggccatggccttcatcgtgctgttcgcaggtgaggcctccaacggtttcaagcatggcgtcgcagtcatcgtgctgattgtcggcatcgtcatcggcgccgtggcgggcgtggtctccgccaagaaggtcaagatgaccgacatgccgcagctggtctccgtgttcaacaccgtgggcggtggcgccgccgcgctcgtggcattgaacgacatcctgacctccgccgaaaccccatccatcgtggtgctcatcaccgcgggtctgggcatcatgatcggctccgtcaccttctccggctcgctgatcgcagccggcaagctgcagggcatcaagtgggtcaagaagctgagcctgccgggcaagggtttctggaacatcctgttcgtcgtgctcaccatcgtgtccttcgtgatgttgtgcgtgcagccgaaccagcgtctgctctggtcgatcctgaccaccgtgttcgccctgtgctacggcctcgtgttcgtcatcccgatcggcggcgctgatatgccggtcgtcatctccgtgttgaacgcctgcaccggcaccgcagtggccatgtccggtctggccatcaacaacatcgccctgattgtggccggcgcgctcgtcggtgcggcgggcgtgaccctgtccatcgccatgtccaaggctatgaaccgtccgctgctgtccgtcttggctggtggcttcggcggctccaattctgcggcgggcgccggagaggggctggagggcaccatgaaggaaacctccgccgacgatctggccgtccagctcgtctacgcagagaaggtcatcttcgtgccgggcttcggtctggcccaggcccaggcccagcgtgagctcgctgaccttggcaccctgctcaaggaccatggtgtcgaagtctcctacgccatccatccggtggcaggccgtatgcctggccatatgaacgtgctactcgccgaggccaacgtcccgtatgaggagctcgtcgacctggatgacatcaatccgcagttcccgcaggccaacgtggctctggtggtcggcgccaacgacgtgaccaatccggccgcccgcaagccgggcaccccggtttccggcatgccgattctcgacgtcgacaaggcgcagaacgtggtggtcatgaagcgtggccgtggcaccggttatgccggcatccagaacgagctgtacttcgaagacaacacgcagatgctgtttggtgacgccaaggcgagtctgcaggccgtcatcgcagcggtcaaggaactcatcaactgacggaccggctcgtcgcctacgcgaagatcaggcccttcctctttttggaggaagggccttttgttattgcgcaagttgtccacagacaggtatgggggtgtggataggtggaaattgtccacttattcacttttttcaaaggattgtgacggagaggtggacggatatgcgacagtaggtgcatctctacgacgaaggagttgcatatgacagttgccgtggccacgccattcaatatggacgaacaggctttcctgcaaacgatggatcggctgatcgagcgcttcgaccggtacagctcggggcgttgtttcgcggaccttgatcggatacgtctcgaacacgatatggaaggtccgctttccctgttcgatgacgtggtgcacgagcttgcggatgacttgttcggcggcacgtcatggccggtgaacctcgacatggatatgatcatattggatcggttccaaataggctatgatgccgaattcctgaccggatgccgcaatgtggttcgtaaatacggcatgagcgcatggctgtatgaaatgattaatgatgcttccgtcgcggtggcgacgcatcggccgagcaacaggatgccgttccagcttggtctgttcgatacacgtgaggtgttccgaaggaaaaagaccaaggggaagaagagcggaggcggaaggaggaaacggctcgaatgcatgatggaatacctgcgacagacctaccgtctggccgcatacactctgttgcgatggggagggggcgagcctagggccgctgatgcggcgctgatggttctcgcttatgggggattgggtatgtgtatgctccgcgatgatccgaaagtggtcgaattgggatgtgatcccgatttccgatacaggcatgtatgcgcccagttgcaggatatgcggatcaaggcggatctggaatatgcctgttctgtggatctgagcgtcaccagctcattggaatatccggcttgcctcgatgccagatatctgtatgacgccgaacacattgtggaggcatatcggaatctgtgggatgagaacactaagcccgtcgcccaactactggccgagatcgaggacaatggcgtatatgaagtggaggatatatggaaagacccgctctatctgcatgaccttgccatctcccttatggggccgtcggcttcgggtcttctccaggaaggcttcagactgcgtgatcgaaccatgttcgagaatggtgtcaaagaacttgacagccaggcacgcaatgtgaggaaggctggtctgctgcttacccttgccggatatatctttttcgccgaaccggaggatcgcatggatgcgatgctcgcttcgcacaaggatcgcaaacgcatgttggacaactatgaaaagcttggcgaaatggccgcgaccatcgccttgtaccgtcttcctcgggatcgcgaatcgcttcgggcagtgcgggccctgctcatgcatgagacgggcgtgtacgcggacaagatgggagagctcatgggtctcgccgacgagccggacggggaagacgaagccaccgctccggtcatggggtgaaagacggttttccgcatattggacatgacaatgctttgggattgactctacaaccattgtaaggtttagccttcctgctggaagacataggccgaaacgggaggataagagacaacccatgggaaagaacctgacaacgggaagcgtgttcagaacgatcgtcaccttcgcgttgccgtatctgctgtcgtatttcctgcagacgctgtacggcatggccgatctgttcatcgccggacagttcatcggcatcgacggcatcaccgcggtggcgaacggcagccaggtgctgtacatgctcaccgtggtcatcgtgggtcttgccatgggcgcgaccgtcaccatcggccgtgcggtcggcgcgaacaggctcgaccgtgcggccaaggccatcggcaacgtcatcacgctgttcgcaggaatcgcgttggcgctgacggtcgttctgctgttgaacgtgcacaacatcatctcgctgatcggcgtgccagtcgaagccgtcgagggaaccgcgcagtatctgaccatctgctatatcggcatcccgttcatcgtcgcgtacaacattatcagctcggtgttccgtgggatgggcgattcgaaaagccccatgtatttcattgcggttgcatgcttctgcaacatcgtgttcgactacctgtttatgggctggctgcgtcttggtccctcgggcgcggcattgggcaccacactggcgcaggccatcagtgtgaccgtgacattggtggcgattcgccgccggcgtacgggcatcagactgaagttcggcgatcttcgccccgatagggccatgctccgcggcattctcggcatcggagtgccgacggcggttcaggacggctgcatccagatcgccttcatcatcatcacggtcatcgccaactaccgtggcctgaacgatgcggcagctgtcggcgtcgtcgaaaaggtgatcagcgcgttgttcctggtaccgtcgtccatgctggccacggtatccgccgtctcggcgcagaacatcggtgccggcaggatggagcgagcgacgaagacactgcgatacgccaccgcgatcaccgtcgtctacggcatcgtcatatcgattgtggtggaactgacggcgggctccatcgtcggcctgttcaccaccgatgcgacggtaatcctgctgggaacacagtacatccgcagctacatcgtcgacagcatcttcgcgggcatccacttctgcttcagcggcttcttcgccgcatgcgggcgctcctatatcggattcatccacaatatcgtggccatcaccctggtccgtgtgcccggggcgtatctggcatccaagctgttcccgaacaccttgttccccatgggcgtcgccgcgcccgccggatcgctgctttccgtgctgatctgtcttggcttctacgcgtggctcaagcgtcacggcgtaatttcggagaaggcgcgtgcatgacggcgagtgagcgaagtggagggcgcgacgctttgccgggtgacggcagactgttccgtataggcaaggttgcagatatgttcaatgtgtcgctgggcacgcttcggcattatgagcgttgcggcttgctggaacccgaatatatcgacccgcgcactgggtaccggtattacggtgccaagcagttcgaggtgctgaacacaatccggtacctgcgtgtgctggatatgccgttgacgcagatagccgagttcctgcacaatcgcgacgtgcatgtcatcgaggacaagcttgttgcacagaaagccctgatcgagcgcaaacagcatgagctggaaatggtccagcggaagatcgaccatcgcttggagcggctgcgggacgctgagcagtccgaattcgacgtgatacgtgttgtgcggcaacccgcctgcaggatcgtctggatcagggattcaccgaaggtcgactcgtatctcggcctggaatattcgatccgcaagctggagcagcatcagaaggattcgctggtcttcctcggcaaggtcggcgtcggcattgacaaggaatcgttggaacagggcggatatgccgattacgggttggtgttcctattgcttgacgacgaggacgaatatgagggcgacaccgtggcattgccggagaccgattgcgtgcgcatccggttccgggggagtcatggcgatgcccccgaccggtatcgcgagctgatatggtacaccgcagagcagggtctcggcatcaccgggttctcacgtgagatcgcgttgatcgatgaagggttgacatcggatcccgcccagttcgtgaccgagatctgcatcccggtgcgctagccactttccggcgacgtgtggcgctacttggctttctccttcagagtcggcgcaagggtgccggccagcgcgcgctcgcccggcctggccaatgggccgaccagttcatgcgccgtgtacggctcctcaagataggcgatgtcggattcgctgagttttactccaagtgcttcgatgacatcatccacgcgctccgtcttcgagcagccgacgatcggtgccgtgacgtccttggcccaatgccaggcgagggcgatccgcgccatcggcacgccgagccgttccgcgagcccgtgcacgcgttcgatgatcggcatatcctgcgcacgtgcctgatcgtacttgttgcgcatggtgccgtcggtggtgccgcgtttggaatcggaatcccaggacggatgggtcagatggccggacgccatggggagtatggggtgagcgccatgttgtactgacggctgttcggtggcgtcggcatcgatggtccactgatggaattacggggaggtcttgccgaaactcataccgccaaggcagaccttggaaacttggatgccggaccatcccagtggggcgtagctcatgtcagtcatactgaagctcttctgccgttgatgttcggaaggtcagcatatcccgtttcgattggcagaaccaatacctcgcatgaatggtttgatatgcaatcgacgcatggaacgatataccatactcacattggacattctttttcgccgggcgttgaatagggaacggtacagagcataaatgaaaggacgggtcgacaatggaaaatccgagcgcattcccgatgggagaaccgaacgacggcttcgcgcagtacttcgtgggacagagctaccttgctccggtgctcgagactccgcagattgccatccataacgtgaccttcgagccgggttgccgcaacaactggcacatccatcacaacgcggcgcaggtactcatcgcggtcggcggttgcggctactaccagatcgagggacaggagccaaaggagctcaaggccgggcaggccgtctgcatccccgcggatacgaagcactggcatggcgccgcccccggcgaatcatgctcgcatctagccttcatggtccctgcgggcgatccggcatccatgagcaacgaatggctcgagccggtggatgccgaagcctacggcaaacttgcctgaggtctgttgttcttatatggagggccatcctgcaaaagtgggatggccctttttgttgttcagggcgataacggtttgaagccttgcggcgagtggcgtcatgcgaggaaatccgcaagcagattgcacaagtagcttgtgtaagtgctatggtggccagctggaggcaatcgaaatggatacgaaagacgaatattcgacatcggatgtcgccatggaattggcgattgcggtcagcaggctgcaagctcggatgaagcatgaggccggcatcgcggaacggggcatcaccgcttcgcagcttgccatgttgaagcggctggataccgagggagaactgtcggtatcgactttggccgcgtacgaacacgtatcgcaacaggccatcacccagcgtcttgaactactgaggtccacagggtatgtcacacagcatgccgattcgaaagatcgtcgtcgtcgactggtcggcttgaccgatgaaggacatgcgttcctcgcccacgtaaccgctagccaaacaacttggctggcgcatgccatcgaatatgcattggatgacggcgagcgcggggacctcgccgctgcgaccacattgatcgaacgcatcgccgccacggaatcgctgccgacgggaggcgacacgcgatgaagacggctgataagacaagagaaactcccgcgtttcccaagaccttcatcatggcgatgatatttggggtcggtctcaaccctgtcaacagcacgcttatctcgacggcgctcgcaccgatttcacatgatttgcggattgatgccggaagggcgaccctgctgatatctgcgctgtacctgacatgtgccatcgcgcagccgacggcgggcaagctttctgagatcattggtcctcgctcggtgttcatggccggtgcggcattggtcatgattggaggactactgggtggtttcgccccgaatctcggcgtgctgctgacgtcgcgtgtgcttattggtgcgggcacatcctgtggctatcctgctgccatgctgctggttcgcagacgggctgatcgcatgggattggcggaaccgccttcgttggtcctttccattctcgctatggtgggactggtgctcatcgctgtcggtccaccgttgggcggcctgttggtcacctttttgggatggcgctccaccttcttcgtcaacgtgttggtcggcatcatcacgattgtgctgggattggcaagcatcgagcccgatgcgaagcatgaacatcgcatgaccgtatccttcttcatcgcgcatctcgatgtcatgggtctgttgctattctccatcacaatcagcgcgctgctgattgttcttatgagtttgcctactttcgacaaggtgtccggttgcgtcactgtcatcgctttgttggcttttgtcgcgtgggagttgcatgcggcaacgcctttcgtcgatgtgcgttcactcgcggcggataatgcgatgacgttgaattttctgcgtgcgatgctcaccatgcttggcgcttatgtggtcatgtacgccttgccccagtggttggaggatgcctgccatatgaacgccggtgtttccggcatgttcatcattccgatgggggtggtggcgacagtggcttcgttatccatcgcgaagaagccgatagtgcgcctgccgttgatggtgtgctgttcggcgatggtggcggtgggcatgttgttggcttgcacgtcatccgctggcatggtcgtattgccgttgaccgcctccgctgtcgcgggactggtgttgggactcagcatgtcgaccagtcagaccgtgctatatcgccgagcggcatccgagcatattggcacgtcgtctggtctgctgcgcacgtccatctatatcgggtctatcggtgcgtcctcattgagtggcgtgttcttcggtgagacggtcactgatggagggctccacggcattggcatcacagttgcggttttgggggtcgccgcgctattggcgacggttatggatcgtacgttgcggtagtccggggaagttgtccgcatcgtgaatgatggtacggacggcctcgcgtgccggatatactggactgcggtgatgggactcgcctgaagccgttacaggcttcgaaccgcaaacccgctgatggttcctacgacatagggtgtgctgtaccttatggctttcagcggttgtggcatcgccattcttccatgtctgtcatattggttcggcacctcgctggaaagaagatacatggcacgacaacatatcattcgagtcgatctcatatgcgtggtgttccttgggggatgcatcggaaccgcattacgctacgcttgttcggtcattcccgactgcggcgcattccatatcggcacattcgcggcgaatatggccgcctgcttcgtatacgcggcgctttcggcatggctgggaggaacccgcagaaccgtgggacgcgcgaaggaatatgtgaaccgtggatgtggcatgggcatgtgtggaggattgtccaccatgtccactctcgccctcgaggaattcactatgctgcatgacggcaaagccatggattgtgcggcgtattgttgcacgaccttcatcgtgggctgtctgctggcatacgttggcgcgcatgtcgggctgcggtttgccggtactgagcataacgatggtgatcgccatgccatgggcaaggaggcggactgatgaataatgcggtcatcgccgtatcggtgtgcctgtgtggtggtctcggcgccgccgcaaggtatgtttgtgattccgttatcaaagcttcttggcataaggcatttcctttgtcgacctttgtgatcaacagtattgccggattcctggcaggcgtgattgcaggtctgtactcacgccggtttctgtcggatcccgcgcatgtgatgttggcgaccggcttccttggtggattctccacattctccaccatgatgaacgaatccgtgacgttgttgcgcggtgggcggatcaccgtgttcgtgggatatgtgctgacgtcggtggtggttcctgtgatggccgcggcattgggatattgccttgtcgtctgagactggagcgaggacgttgactcggggcgtcgtttcattgtctctgggtatggatggtttatggattaccgcgacgcggattggatagttttccatgaaaacgaggaaaaactattgtcttttccgtgtttcctcgatacattggtggctggccgcccatgacaatcgaaaggactgaccatgacgcagcagggcatgtcgaccaagtcgaggcatctgaccattcccgatctcatcacgataggtgtgttcactgccttgtatttcgtgctggtcgccgtggccacgctgttcagttccgtggctttgatgggattcggcatgattcttctgcctgcggtcgccgcattgatctgtggttgcgtatatatgctcctggttgccaaggtcggaaaattcggcgcgattagcgtgatgggcatcgtcgtcggattgttcttgttcgtatccggacatttcatcctttcccttgctgcgagcatcgtgtttccggtcatcgctgatgccatcgctcgcgccggggactatcggagcaagacaggtatcctggcgagttatgtcgtgttctgctatgggctgaccggtccgattctgccgttgtggttcatgaaggatgcctatgtggccagtctgcaggcccgtggcaaggactcgtcctatatcgatggtgtgttcgcacatgtcaataccggcacgtttttcattgccatgatagtggtactggtatgtgcgttgctcggaggctggtttgggcagcgtatgctgaagaagcattttgcgaagaccggcatcatctgatggccctggacccaagaaccaaactgtacctagtggcattggccaacctgttgctgttcttccatgtcgacgtggttgtggagtcgcttacagtattgctgcttcttctgccactgctcggcgcgggacgatgggcggctgcggtacgcttcggttgcatctatgtattgctactagtggggacttgggcatcgacgcttgacgatggcggcagctggttgcatatgcttggtttgctttgtgtcggcatccggatgatgatgccttgtctgattgccggcatatacgcattcaccacgactacggccagtcaattcgtgtgtgccctgcggcgcatgcgcattccggagacgattgtgattccatgtgtggtgtgcatccggttcttcccgacaatccatgacgattaccatcagattcgtgacgcgatggcattacgtggcatcgcccaggggacattcgccctgctccgtcatccggctcagtctttggaatacatcctgatgccgttgttgatgaacgctacgggggtcgcccaggatttgtccgtagccgcactgaccaaaggaatcggcattcgcgggcctcatacatgtcataccgaaatccgcatgcatggcattgattgggcatggatggtcatctgcacggttcctctggcattgggcattggaggagcatggtgagtatcggaagtgatatcaatcggatagtcgcatggacgcaacggtgctcattcgcatatcatgctgatgaagctgctgaggtcgatgcgctgaatgacatcagctgtgccataccgcaaggcgagattgccatcttatgtggacaaagcggctgtggcaaaaccacgtacacacgtttgctcaatggtctgatacctggtttctattccggcgatttgcagggcatccatatgacgtgcggaatccgcgccggattggctcctgtggaaagctatgtgggacaggtgggcagcgtattccagaatccgaagacgcagtatttcaatgctgattccaccgatgagctggcattcccctgcgagaatacgggcatgtctcccgcgcggattcggcaacgcgtgcatgatgtcgcggagcagtttcacatcaggcatctattaggtcgtaggatcatgacgctttcaggtggccagaagcaacagcttgctgtcgcggcatcgaccatgctggctcctggactcatcgttatggatgagccgacaagtaatttagatatggtggcgattcgcaggctgcatgacatggtctcccgattgagagctgatggaatgaccatcgtcattgccgaacaccgtcttgcatggtgcgcggatttagcggaccgtttcatagtgttcgatcacggtacgattctcggtgaatatgaggcgtccgattttctggcgatgtccgaacagcgcgtcgcggcattaggattgcgcgccctcgatgacagaccatacaggcttgccgtgcatcgtaaactccaacatggaggcattgcgcccgacgaggacaagcgacaggtcgtcattggtgtgcgcggcctgagtgtaggccatacaaagcggggacttctaggccgcaagacacccgtattcgcacgtgatattcccgatttcgacattcacgagggtgagattcttggccttatggggtcgaacggggttggcaaaagcactttggcacgtacgctatgcggtcttgccgctccgttgaacggcatggtgctattgaatgggacgaaagcgagccgcggcgctttgactcgtgccggatttctcgtcatgcaggacgtcaattaccagctcttctccgatagtgttcgggaagaggcattactgggacttgatgggatggatgacgctgtgcgtgaccgatgcgatgctgtgctacgagacctcgacctattggattccgtgcagcgccacccgatgagtttatccggcggtcaaaagcagaggctggctatagcctgcgctttgatgagcgataagcgattcattgttttggacgaaccgaccagcggactggaccggttgcatatgacccaagtcggcggacttctgcgaaagctcgcggaccgtggcaaagcggtgttggtcgtaacacatgattatgagcttgcagcgctatggtgcgaccgcatcatagcgctggaagacgaactgcataacgaacagggagaagaagaggatcgtctggcatggacttcaatgtgaacgattggctgggagactggattagcttcgaacatttgatcaacaatcatgacccgaaccttgaccgggcttggaaggattcgacgaaagccatgcgatccaagccgctgttcgcgatcatgatgctcggcgatgcgcgacgcttctgggcaaaagcctgcaaaacctcgggcaaggagtggcgattccgcattggtggatggcatatcgagcagccgtccgcagttggcgacgatgatgctgtcgcaggctttaacctgacttggctggacgaaaaacgcacccccatcacaacacatgaatatcggcttgatcatgtgcacgacaaggggctggaaggcaaaccctgctatgtgttccacgctagcgatgccggtgcctccgatcccttcgccgtactcatcgcgatggagcccatgcctgaacgctccgtgctcagacacgggggactgctcagtcatctgcattttcaatatgcctctgatgaaggcgaactcatcaaaggtactggcaaacaagccacgctccgccatcgcatgtggtatcccaccatgtgcgccgctgaagggacgttacttgatcaatgcaacatcgtacgtgcgctgcatcatcttcaagcatggcgggaactgcctgtcccatcatcagactgactgcagatgcccgaagatgggacaatatcagcattgcgacgattgtaggtatcgtccagtgacgctttccggacatgcggcgatccgagaaggcgctccctcgcatactacgcgtccgcctgcttcaccgccgcccggtcccatatccaccacatagtccgcattggcaatcacgtccaaatcatgttcgatgacgaccaccgtcgcgccattcgctacaagttcatcaaacacgtgcagcagcacgcgaacatcaagcggatgcaagccgattgtcggctcatcgaacacgaataccgcatcatgctgtttccgccccatctcgctggccaatttcaaacgctgggcctcaccgcccgacagcgcgggagttggctcgcccaacgcaagatagcccaaacccaattcatgcaacgtggcaagcttcgtttggatcggtttgacatctcgtaagacaggcatggcatcgtcgacggtcattgtcattaactgcggcatcgaatacgccactccgtcggtgcaggggagcttcagctcggcgattgcatcggaataccgcgagccatggcatgccgggcattcgatatcgacgtcaggcaggaactgcacgtcgagcgaaatcgatcccgtgccgtcgcacgtcgcgcaacgcagcttgccagtgttataggagaatgcccccgctttcagaccgatggtccgcgcagcatctgtttttgcgaacgcgcgtcgaagatcgtcatggacgccgcaatatgtagcgacggtggaacgtatgttcgcgccgataggcgtggcatcgataagatgtgccttggacacaccgtccgcctcgaggagccgcacctgcgtcggctgcggcgacctgtcgatccgcgactgcaaagcgggcatcaacatctccagtaccatcgtcgtcttgccggaaccggatacccctgttacggcggtcagccgtccacggggaatatctaccgataacgggccgacggtatgcagacggtcggtttccatatgaattcgtcctgcggagaagatttcatgggcgtcaatgttgtcacgcacacggtcatgaacgttgccaccctgggcaaggaacggcgcgatgcgcgattcgcgggtatcaatcacctgcggcaccgttccctgcgcaatcacctgaccgccctttgcgccggcacctggccccatctcgatgagataatcggtttcggccagcacccgagtgtcatgatcgaccactaccacggaattgccatcagccaccaggtcacgcatgacaccgagcagtccgtcgacattcgcgggatgcaacccaatcgacggctcatccagcacatataacacgcctgtggtgcgattgcgcacggcgcgggcaagctgcacgcgttggcgctcgccggtggacagcgtggctccggcgcggtccaaggacagatacccgagaccgagttccaataaacgccgtgacgtattgaggaacgattcacagatggcgctcgccatggtgcgcatatgtggttccagcgattccggcacggaccctacccaggaaacgagtgcgtccagagacatcgcggttgcctgagccagattgatgtctctgatacgtggctggcgggcgcgttcggaaagtctggtccctccgcaatcgctgcagggacgctctttgaggaacctcgcaacacgtttaagccctttttcgtccttggctttggtgagggcgttctccacggtgtatacggcgttgtagtacgtgaagtcgagttcggcgaaatcgtcgccttttttcggcttgtataggatgtgcttcttgatggctgggccggcgaacacgatatctcgttcttgttcggtgagttggttgaacggtacgttggtacgtactcccatggccccgcatacttgcttcatcaaatcccacatcaacgatccccacggcagcacggctccctcgtcaatgcttttcgactcatccggtaccaaggcggaacggtcgacttccctcatgattccggtgcctgagcatgtcggacacgcgcccgcggcgttgaatgcgagatcctccgctgatggcggatgcatgagtccgccgcagaacgtgcaatgcatcggaagctcggcggcaacgttcatcgtgggttggttgcgtgctccgcagtgttcgcacacgtgcgatccgatccgggagaacaggaggcgcagactgttgagcagttcgctcattgtgccgaacgtggaacggactccaggcactgatggacgctgatgcagtgccaatgccgccggaatatgacgcacctcgtcgacggttgcgcggcttgcctgggtcatacgtcttcttgtataggtcgatagcgcttccagatagcgtcgtgatccctccgcgtacagcacgccaagcgcgagggagctttttcctgagcctgagattccggctatgccgaccatgctgttgagcgggatgtcgatgtcgacgtctttcagattatgtacgtgggctccgcgcacttcgatacatgaggggagtggccgagacacttgtgtttcgtatgcaaagatagaaggagacggtttcataccggcaattctatgcttgccatatggttatcacatatacggatgaaaagaaattcaccaaggaacagacccagcgactgtttctttcagtcggctgggtgtccggtcaatatcctgaacggttgcataaggcgttgatgaggtcatccaccgtattcagcgcatgggatggcgaacgtctggtgggtctggtgcgagtgcttgatgacacggagatggtggcatacatgcactatgtgctggtcgatcctgaataccaagggcgcggcattgccggacatcttgtcggcatggtcaagcagcggtaccacgattacctgtatatcgaggttatgcctgaggaaagcaagaatgccacgttctatgagaagcatggattccatattatggaggatggcgtcgccatgcagatatgcaatccgggagaacggcactgacggaacgggcatcgggcatgtcttgagaacttcgggcggtgaggggcgccatctttcgccggaggcgtttccattaccgcttatattttttggggttcggctgtcagatcttgaatgaacgacggatgaatccgtatacggtgtcccagtagcgtttcggatccacggcggagctttccatatgatcggcgtccggaaccagcagacgttcgcggtcgatgctggagcaggcgttgtagttcatgtcgaggaaacgtgggctgaccatgcggtcctttcctccatggatgaacagcatcggaatgaccgtatgccgcaatgacggtatgcaggacgcttcggtgaaatcatagccggcacggcgcttgcagatcagacccgccgcgtccacacatgccgaggcgagaagctttggcatgtggaacatgcctcgcgcgctgtctatgaattccatgcgggcggaagtgtatccgctttcggcgattgccgcgatgacattgcgtggcagttccggcgtgccggtcgtcatcatcaccgtcgtggctcccatggatcctccgaataggagaatgcgtgcttgatcgtcgctatccacaatcagccgtatccaatcaagcagatcattgcgctccaaccatcccatgcctacatatcgtccttcgctcagatcctgggcccgttgggatggtgcgaggacggtgaagcccatgcgggcatagcggtgtgcccatttggcttgttcttcaggggctccggtatagccatgcacgcagatggcatatatatgcggcgtcgggtcgatgcaatccggatcgaagagccagccatgcagcttaagcccatcgcggctggtgatggataccggctgtttcgtttcggaaaaccattgctcggcctctttggcctcgccttggttcatctttccctcgcgatccggagcgatcagcgcctgatggaaaatggaatgcttccactgcgtgtcgatggcaaagcggaacagcatatgtgctgacgccgcgagcaatcccgtcgctgcgacggtcgtgacgccagtcgcgagctgaatgttgcggatgagcgcggaatggtcatgcgtcgttgccattttctgattccttaccactggttggtgcttgtctgactacgattgtacgtgggtttgcgcatagtccgcgttttatgcaccttgctcctctgattgcagggaaatgtcagcgcaccatgtatactagataattgttgtcttggcgagggaggttccgcctccgttatcgacttggcgtatgatatgaaactccttgggttttttatgcggctcgtcggtgcgccgaaacataagaacgatgtatcaaggagatattgattatggctaccaccatcactcttgaaggtgctgctcgtaccgagttcggcaagggtgctgcccgccgcatgcgcgtcgcgaacctcatcccggccaccgtgtacgccggcggcgaggatccgaccttcgtgcagctgccgatgaaggagaccactctggctctgcgtcacaccaacgccctgttcaccatcaagtatggtgacgagaccaagatggccgtcgtcaaggacgtccagcgcaacccggtgaagcgcatcgtcgagcacgtcgatttctacgaggtcaaggccggcgagaagatcgacgtcgaggtgccggtgttcgtcgaaggcaccccgaagggcgctgctgtcgcattcgtcgacatccaggagctcaaggtccgcgccgatgtcgccaacctgccggagaagatcgtggtcaacgttgatggcctgaccgatggttccaaggtcttcgccaaggacgtcgtgctgccggaaggcgtcgtactcgatgtcgaggatccggaagaatccgtcgtcaccgtcgaggtgccggaagatgccgcaccggttgaggccgctccggctgctgacgccgctgccgctccggctgctgacgctgagtgagccgtatcgttgtctatactggctgctccacaagcatgaggtagccggtgaggaaggggtccgtatgggccccttcctgctttatgaggatcgttatctcatatcgcgaacgccggttatcgaaagcgtttatggtgtgagagagtacataccagaacccggcgccacaagcgccggagaccaataaccgctggccgcctttgggtggctgatgcaactagaagaagtaaagaatgactgaacagaatcatcacgatccggcggagcttgacaagctcgccgagaagttcaccgtgctcccgaacgacaacccggcatccgacgccaagcgtgccgaactcatcgacaagccggctttcggtcaggtcttctccgacaacatggcccacatgacctggaccaagggtgaaggctggtcggaccgccgcatcgagccgtacgcgccgctgaagatggacccgggcgcatctgttctgcattacgcccaggaatgcttcgaaggtctgaaggcctatcgtcacgccgacggctccacttggctgttccgtccggatgcgaacgccgagcgtttccagaactccgccaagcgtctgtacctgccggagctgccgatcgacgacttcatcggctctgtcgccgccctcgtcaagcgcgatgtgaactgggttccgtcccgtcgcgaatacacgctgtacatgcgtccgttcatgttcgcttccgagccgttccttggcgtgcgcgctccgcaggaagtggattattgcgtgatcgcctccccgtccggaccgtacttcccgggcggcgtgaagccggtcagcatctgggttgaagacaagtggttccgcaccggccctggcggcactggtttcgccaagtgcggtggcaactacgccgcatccctgcttggtgagtacaccggcatcgaccacggctgccagcaggtgtgcttcgtcgacgccgccaccaagacctaccttgaggagcttggcggcatgaacatgatggtcgtgcacaaggacggccacgtggaaaccccgtccctgaccggcaacatcctgccgggcgtgacccgccgctccctgatccagctcatccaggacaacggccacgacgtggtcgagaccatgatcgctctggaccagctgcttgaggacatcaagtccggcgaagtcaccgaggtgttcgcctgcggtaccgccgccatcatcaccccgatcggtcgcttcaagtccgagaagttcgatgtgaccgtcgccgacggcggttccggcgagttcaccctcgcactgcgcaaccagctgctcggcatccagcttggcgagatcgaagacccacacaactggatgtggaaggtctgctgattttcccgttagcgattattagctgacatatagctgtaatggccgccggagggtggcgcgtgcttcaggccaattcacatggtctggcaatgtacgtgccgccctccggctcttttattgcagctcttgccccatattgtgctatttttaacagctggttggaaaagaaatatgtgagggaaggggagtggccatggaagtggcgctggaaagcaacggcttcttcataggtatcgaatatctggcgaccttctgctgcggcatggtcggcgggctcgccgccgtacgcaaaggctatgatatttttgcgattctcgtcaccacatggctcaccgcattgggtggtggcatcattcgtgatgtgctgctcggagcgcttcctcccgcaggcgtctccgacaaagggctggtgatcaccgcactgctcgcagctgtggccgtagccatcatttatcccgaagtcgacaagctcaaatggtccatgctgtcattggacgcgctggcattgggtctttacgccgtcaacggcacatccaaagccatgatgtactacatgtccggcaccacggcagtgttcctgggcatgttcacggcacttggcggcggactcatccgtgacatgctcatcaacgaggtgcccatggtgatccgcgacaagcattggtacgcggtgccttcagccgttggatgcgtattgacggtactcgtatgtaaaggagtgaacgagggaatcgtcagttttcccgccgaagtcttgcttgatgtgctgattgtggtgctgatggtggccatgcggcttatctccgtgtttttcgacattcaattgccgggggctttggccaggcataacacctacctgccgagcgaagccaaatatctcaaacgtccggtcatccatcccgatcggaatgatgacgatatcaagcgtaagtgagcattttcaacagagtacgaaatgtaaaaaagaagaagccccgcaggttttcctgcggggcttcttacaagctgtgagttacgaaaactcagagagcgttgatggccacagcgagaccggacttgcggttggcagcctggttcttgtggatcacgccagcgccggcggccttgtcgagcttctgggctgcgaccttgtaggcggcttcggcggcggccttatcgccagcggcgatggcttcgcgggtggcgcgaacggcagtcttcaggctggacttcacggccacgttacgcttgtgcgccttctcgttggtgagaacgcgcttcttctgcgacttgatgtttgccactatttctccaaacgacgtttgctataaggacatacaaacgatgatgataacatggcacgcggataaatcgccaatgcgtataagagtgtcgcggaaggacatgccgacactaccagttagaatcgtttgcgtcgaatatttccagaggaggatggcgtgggccaacagcataatcagcccgggtacaccgatcagtcgttgatccgcaacttttgcatcatcgcgcatatcgatcacggcaaatcaacggtggcggaccgtattctgcagttgagtggcatcgtgccggagcgcgagatgcgcgatcgcttcctcgaccgcatggatatcgagcaggaacgcggcatcaccatcaaatcgcaggccgtgcgcgtgccgtggacggttgacggcaccgaatacacactcggcatgattgatacccccggccatgtggacttcacatacgaggtgtcccgagcgttggccgcatgcgagggtgcggtgctgcttgtcgacgccacgcagggcattgaagcgcagacgctgtccaacctgtatatggccatcgaccatgatctggccattatccccgtgctcaacaaaatcgacctgcccagcgccgaacccgacaagcatgccgaggaaatcgccggcctgattggttgtgacccgtccgacgtgttgcgcgtctccggcaaaaccggagaaggcgtcgccgaactgctcgaccgtatcgtcgccgaagtgcccgcgccggcgggcaacccggacgcgcctgcccgcgcgctcattttcgactccgtatacgactcctatcgtggcatcgtcacttacattcgtatggtcgacggtgaactgaaatcgcgcgagaaactgcacatgatgggtatcggcatgacgcatgaccccatcgaaatcggcgtgatcagccccgacatgatgcccaccaaggcgcttggcgcaggagaggtcggctatgtgatcaccggagcgaaggacgtcagccagtccaaggtgggcgacaccatcacctccgccataaatccggctaccgagccgctcgaaggctaccgtgatccgcaaccaatggtctacgccggcctgttcccaatcgacaacgcgcaatatccggaactgcgcgaggcgcttgacaagctcaagctcaacgacgcggccctcatctacgaaccggaaacctccgtggcgttgggcttcggcttccgttgcggcttcctgggcttactgcacatggagatcgtcaccgaacgtttgagccgcgaattcgaccttgacctgatctccaccgcgccgaacgtgccgtacgaggtcaccgcggaagacaattccgtgcatcgcgtcaccaatccgagcgaattccccgaaggcaagatcaagaagatcgtcgaaccgatggttgccgccgacatcatcacgccgaaggatttcatcggtgcggtgatggacctgtgccaagaccaccgtggccagatgggcaccatggaatacatttccgccgaccgtgtggaaatgcattaccgtattccactcgccgaaatcgtcttcgacttcttcgaccagctgaagagccgtaccaaggggtatgcgtcgctcgactaccacgaggatggcgaacagtccgccgatctggtgaaggtcgacatccttattcaaggcgagaaagtcgatgcgttcagcgccatcgtgcaccgtgacaaggcgtacagctatggcgtgatgatgaccaagaagctgcgtgagctcattcctcgccagcagttcgagattcccatccaggctgccatcggttctcgaatcatcgcacgcgaaaccatccgcgccctgcgtaaggacgtgctcgccaagtgttacggcggcgacatctcccgtaagcgtaagctgctcgaaaagcagaaggccggcaagaagcgtatgaagatgctcggccatgtggaagtgccgcaggaggcgttcatcgcagccctgtccaccggcggagcgggcaacgaccgcgacaccaaggacaagattcgcgccgcgcagaagtccgaaggttgagcctttcgtgacgttcgaaatctacattcatgttccgttttgcttacgtcgctgcggctattgcgacttcaacacctacacggccgtggacatgggcgcgggcgcgtcacgcggcaactacgcgaacatggttatccgcgaaatggcgattgtccgcgattggcagacaacgcacggtatcaacgagccgaaggtggcaaccgtcttcttcggcggcggtacgccgaccacactcaaggcaagcgatttggtcgccatgctggatgcggtacgcgccacatggggcatcgccgatgacgcggaaatcaccaccgaagcgaatcccgacacggtgaatgccgactatgtgaaagaactcgcagacggcggtttcaatcgtatttccttcggcatgcaatccgcggtaccgcatgtgcttgcaacgctcgaccgtacgcatacgccggaaaacgtcgccgccggaatcgccgcggccaatgcagcaggcatgcgttccagcgtcgatctgatctacggcgcgccgggggagagccttgacgattggcgcacatccgtccgcaccgccatcgatttgggcgtcaaccatatttccgcatatgcgctcaccatcgcgccgaatacgaaaatgggacgacggatcgcggcgggcacgttgtcgagaccggacgatgacgacgaagcgaacaaatacgaaatcgccgacacgatgttcaccgaagccggcctcgaatggtatgagattagcaattgggctcgtcccggatacgagtcgcaacacaaccttggctattggaggaacgtcgattgggccggtctcggtcccggtgcgcattcgcattatggcgattgcgaagacggcaaaggattgcgctcctgggatatcgcgcatccgcgattgtggggcaccgccatcaatgagggcaatgtgccatgggccggcagtgaacgcatcactgccgccgaggacatcgaagagaccatcatgttgggcctgcgcattcgtgaaggactcgacaccagacaattcagccacttgattcctgaacaaaaatggattgagcttgaacacgacgggctgatcacaatgcttgatggccgcgccatacccactttgcgaggccgactgctcaacgacaccatcatcacggagctgttggaaacactggactgaccgggttaatgagcataagtgaagtgcgtgcgcatgagcatgacatgcgaagtatgcgttcatgggctaaatcctctgcgaggcattgacaaaaatagccattcgttatatggacacgtgcaacgttgctgacatactggcgcggtattctaaaccacgcattaaagaaccgcaagacttttcttgcccaaaaacattgaaggtggtttcggtgactttccacgccccgttagatctgacgatccatgattcccaaggtatgtacgatcctggagccgagcatgatgcttgcggcgtgggtatggtcaccaccctcaacaagcgtccggaacgcaagatcgtcgatgacgccatcgaggtgctggtcaatctgaaccatcgtggcgccgtgggcgccgaggagaacacgggcgacggcgcaggcattctcatgagtatgcccgacgaattcatgcgtgccacggccggtgtggagcttcctgaagaaggtcattacgccgcgggcatcgccttcttggatcgcgacatcgccacttccggccagcaggagcaggccatttccaagatcgtgcgcgaagagggcctcgaagtgctcgcatggcgcgtcgtacccaccaatccggacggactcggcctgcaggccctggccagcatgccggcgttcaagacgctgatcgtggccgatccggaaggcaagctcggtggcatcgaactcgaccgcaagaccttccgcatccgtaagcgcgtggaacacgaggtaggcatctacttcgcgtccctgtccgcccgcaccatcacctacaagggcatgctcaccaccatgcagctcaagcccttcttccttgacctgtccgacgaacgcatgaaggcgaaaatcgccatcgtccattcccgcttctccaccaacacgttcccaagctggccgctggcacagccgttccgccagctggcgcacaacggcgagatcaacaccatccaaggcaaccgcaactggctgtccgcacgtgaaggccgactgagttccgaactgctcggcgaattcaagccgctgctgccgatcgccacccccggctattccgattccggcactttcgacgaatgcctcgaactgctgcacctcgccggccgttccatgccgcacgccatctccatgatgctgccgccggcatgggagaacaacgaccagctcgatccggacgtcaaggctttctacgaatacaacaacacgctgatcgaaccatgggatggcccggcgcacatcatcttcaccgacggcacccaggttggtgctctgcttgaccgtaacggcttccgcccgggacgttggcaggtcaccgacaatggttatgtcgtactcgcgtccgaaaccggtgtgctgccggaagtcgccgaggagcatatcgtcaccaagggccgtctggaaccgggcaagatgttcctcgtcgacaccgacgagggtcgcatcatccccgacgaggaaatcaagaagactcttgccagccagcacccctaccgcaagtgggtggaaggcaactccgtggaattgagtcagctgcccaagcgcgagcacgtcaaccactccggtcagtccgtgcagcgtcgtcagcgcgccttcggctacaccgaggaagatctgaagctgctgctcgccccaatggccaacaccggcaaggagccgctcggctccatgggcaacgatacgccgctcgccgcgctgtccaagcacagccgcatgctgttcgattacttcacccagaagttcgcgcaagtcaccaacccgccgctcgactgggaacgtgagaagatcgtgaccagcctcgaatccgccattggtcccgagccgaacctgctggccgattccgaactgcacgccaagaagatcctcatcccgctgccggtgctcaactccgacgagatggcacagctcaagcgcctcgaccgcgccaagattctcggtggctattacaagccattcatcgtcaagggcctttaccaggtggccggcggcggacaggcactgaaggaccgtcttgacgagatcttccaggagatcgacgaggcgattgagaacggcgccaacttcctggtgctgtccgaccgcgattccaactatgcgtggggtccgattccatcgttgctgctcacttccgcagtgcagcaccatctgctgcgccgccacacgcgtacgcagatctccatggtggtcgaagccggcgatgtgcgcgaaatccaccatgtggcactgctgatcgcctatggcgctgccgcggtgaacccgtatctggcattcgaatccgtcgaagacctctcccgcaagggctacctcaaggtcgacgcggaaaccgccgtgaagaacctgacccgcgcactgtccaccggcgtgctcaagatcatggccaagatgggtgtctccaccatcatgagctaccgtggcgcgcagctgttcgaagcggtcggtctcaacaaggacgtcatcgacgagtacttcaccggcaccacgtcccgtgtgggcggcgtcggcctcgacgagctcgccgaggaagtcgccagccgccatcgcgtggcctatccgacccaatggaccgcccgcccgcaccgcaacctgcgtaccggcggcgactacaagtggcgtcgtaccggcgaggaccatctgaacgatccggaagccatcttcctgctgcagcagtccacccagcgcggcgactacaacctgttcaagaagtactcgaaccacatcaacgacacctccaaccgtctgatgacgctgcgtggcctgatgaagttcaagtccacccgcaagccgatcgacatttccgaagtcgagccggccagcgaaatcgtcaagcgtttctccaccggcgccatgagctacggctccatctcccaggaggcgcatgagacgctcgccatcgccatgaacacgatcggcgcacgctccaactccggtgaaggcggcgaatccgaggatcgtatcaacgatccgctgcgctacagcaagatcaagcagatcgcttcggcacgcttcggtgtgaccagcgactatctggtgcatgccaccgacctgcagatcaagctcgcccaaggcgcgaagccgggcgagggcggccacctgccgggagccaaggttccgccgtggatcgccaaggtacgtcacgccaccccgggcgtggagctcatctccccaccgccgcaccacgacatctactccatcgaggatctgaagcagctgatcaacgatgcgaagatggccaatccgaaggcccgcatccacgtcaagctcgtctccgaattcggcgtcggcaccatcgctgccggcgtggccaagtgccatgccgatgtggtgctgatttccggctatgacggcggcaccggcgcggctccgctcaacgccatcaagcatgccggcaccccgtgggagatcggcctgtccgaaacccagcaaacgctggttctgaacggcctgcgttcccgcatcaccgtgcagtgcgacggcgagctcaagaccggtcgcgacgtggtgatcgccgcgctgcttggcgccgaggaattcggcttcgccaccgccgcgctgatcgtcgaaggctgcgtcatgatgcgcgcctgccagaagaacacctgcccgcagggcatcgccacccaggatccggagctccgcgcacgcttcaagggcaagccggaacatgtcgtcaacttcttcatgttcatcgccgaggaagtccgcgaactgctcgcgcagctcggcttccgcacgctggaagaggccgtcggccatgtcgaatgcctcgaccaggacgaagccatcaagcgttggaagtccgacggcatcgacctgagcaacgtgctcatgcagccgggtccggttccgggaaccatcctgcacaagacgatcgatcagaaccatgagctcgacaaggcgctcgacaacaagctcatcgagcttgcccagccagcccttgacaagaaggagcccgtgcgtatcgaaatgccgatccgcaacgtgtaccgtacgctcggcaccatgctcggctatgagatcaccaagcgttacggcgaggaaggtctgccggacgacaccatcggcatgacgttccatggtgccggcggccagtccattggcgcgttcattccgcgtggcgaaaccatccgcgtctacggcgaagtcaacgactacgcgggtaagggcctgtccggcggccgcatggtggtccgtccagaggacggcatcaccttcgatccgcacgagaacgtgatcgcaggcaatgtcaccggcttcggcgcgacttccggccaaatgttcgtggccggccgcgcaggcgaacgtttcgccgtacgtaacggcggcgccaccttcgtggtggaaggcgtgggcgaccacggctgcgaatacatgaccggcggtacggtcgtgattctcggctccaccggccgtaacctcggcgcgggcttctccggcggcaacgtgtacgtgctcgacctcgacatgaagcaggtcaacccggcggccgccaccaacggcgcgctgctgttcgagccgcttgacgccgatgccgacaagctggtgcacggtctcgtcaagcagcatgccgaagagaccggctccgccttcgcgaaggccctgcttgacgactgggaaaacagcgccaagcgattcacccacatcgttccgaagcacttcctcgccatgcagaaggcgatgaaggaagccgaggagaagaacatcgatttcaatacgcccggcgtctgggaacaggtgtacgagcaggttatggaaggagcgcgctgacatgggagatcctcgtggattcctgaaggtccgtacccgtcgcgaactggccgaacgccccgttgaagagcgaatcaaggactggttcgacgttcacaccgaatccggcctgcagtcctggaccaccgagcaggcggcccgctgcatggattgcggcactccgttctgcatgagcggatgcccgctcggcaacatcattccggagttcaacgatctggtccgtcaggagaagtgggaggacgcgtacaaccgtctgtccgaaaccaacaacttccccgaagtgaccggtcgcatctgcccggcattgtgcgaagccgcctgcgtgcttggcatccatcagccggccacgatgattcagaacgacgaacgcaccatcatcgatcaggcatggagccttgactacgtcaagcctctgccgccgcagcgtctgaccgaccagaccgttgccgtggtcggttccggcccatccggtctcgcctgcgcccagcagctcacccgtgccggccacaccgtggtcgtatacgagcgtgatgacgccatcggtggtctgatgcgttacggcattccgaacttcaaactcgacaagcgcctcatcgaccgccgagtcgagcagatggaagccgaaggcaccgtgttccgtaccggcgcggaaatcggcaaggacatctcctgggatgacctgcgttcccgctacgacgcagtggtggttgccatcggctccaccgtgccgcgtgacatgaagattccaggccgtgatctcaagggtatccatttcgccatggagttcctgccggacgccacacgtcgcgtgtacggtgtcaagccggtcaacgacatcaccgccgaaggcaagcatgtggtgatcatcggcggcggcgacaccggttccgactgcctcggcacatccctgcgccaaggcgctaaggacgtcaccgtgctgcagatcatgccgcaggaaccgaaggagcgtccggccaaccagccatggccgaccttcgcccgcctgtacaaggaaacctcctccatggaggaaggtttcgaaacgcagcgcgccgaatacgtgtacaacaccgactcggtcaacttcgagggctccgatgaggacaaggccaaggtgaaggtggagaactccaccgccaccgaaggcttcgtcgccgacgagaacggacatgtcaccggtctgaaggtcgtcaacgtcgctccaggagagaacgggccgttcacccgccagccaggcaccgaacgagtgattcccgccgatctggtgctcatctccgtgggcttcctgcaccctgacaccaccacgttggtggatcagctgccggtcgaccttgacggtcgaggcaatgtggcgcgtaacgacaagttcgccacctcccaggacggcgtcttcgcctgcggtgacgccggacgtggccagagcctcgtcgtgtgggccatctccgaaggtcgctcctgcgctgccgcggtcgacgagtaccttaccggctccaccgaactgccggcaccgatcgtcgcttccaagcgtccgatgatgctgccgcgatagacaacactgttgtaagggtatgaacgaggtagcccggttcgcgaatagtgagccgggctacctgtttttcacccgaaatgcggtaaagtaatcccagcaccatgcaacaaaggagtgactaatgccaaatcgcgcagaacgacgtgcccaagccaagcgcaatcgcaggggagtgccacagcaatacgaccaaacccaaggccgcgcacgttccggcatgttggacgagtatcagctgcaggaaaagtcacgtcgtctgcaggacggcaccgatgggccatggaagccgagtgccagtacgatcacggaaacggaaaacgtgctgaacaccaatcctgattacaagaatccgaagatgttcaaggcaccccattccgtccgccaatggttccgtgtggccagttgggtgctgattgcgctgtcggccatcgccttcctcgtggtcatgtggctgccgtcgcatccgatgtggctcatctccacagtcgccatcgtcttcgcagtcggtgtgctgagcctgttcttcacggccggcaacccgaagcacaatccgaatctcgaccaaaacggaacagccgtctgatcacaaaaacgatggaaagcggtgagacaaccagaagcatttgtctcaccgctttttctatcggattttaggtatgcgctacttgacttcgactaaccgtaaagggtatgcgagaatgctgtttcatcgtttttcagaaaaagaatggaactttctgaaaaacgatgaaaacaatgagtgtttttcgtgtctgatgttttacagtagaacaggaaacgctggaagactcgaggaggagattacagacatgaaggttgacattctatcgcgtgaatacccgcccaaggtgtatggcggcgcgggggtgcatgccgaagagctttccaaggtgctggcggaacgtgtcgatgtgacggtccgcgcattcgacgggccgcgcacggccgccgacattcccgcgattcccggaaccgacccgaaagggtcgctcacggtcgtcggctacgacgtgccgaaggagcttgaggatgcgaacggtgcgctgaagacgtttggcgtcgatttgcaaatcgccaacgacgttgatgccgacatcatccatgcgcatacatggtatgcatgtcttgccggctatctcgccaaaatgctgcatgacaccccattggtcatcaccgcgcactcgcttgaaccgttccgtccatggaaacgtgaacagttgggcggcggctacaatctgagctcttgggctgagaaagacgcctacgagcatgccgaccgcgtgatcgccgtatccgcgggcatgcgtgaggatatcctcaccgcctatccgaaccttgacccggacaaggtggtcgtagtgcacaacggcatcaccatgagccagtttgaaaccccggcggatgacgattcgggctggaaggtcttcgaacgttacaacatcgaccgcagcaaaccgaccttgctgttcgtcggacgcatcacccgtcaaaagggtctgccgtacctgcttcaggcactgcacttcgtggacccgaacatccaggtcgttctgtgcgccggcgctcccgacacgccggaaatcatggaagaggtcaaaaccgccttcgccaagctcgacgaggaacgtggcaacatcatctggatcgaggagatgctgccgaagccggaactcaacgcactcgaacatggctgcgacgcattcatctgcccatccatctacgagccgctcggcatcgtgaatctggaagccatggcatgcggtctgccggtggtcgcctctgcgaccggtggcattccggaagtcgtcgtcgacggcgagaccggatatctggtgccggtcgaccaactgcatgacggcactggcaccccaaccaaccctgacaaattcgtgcacgatatggccgacgccatcaaccgcatcatggctgaccctgaaaaggcgaagcggatgggacaggccggttacgagcgcgcccgcgaccacttcagctgggagtccatcgcagacaagaccgtcaaagtctacgaggacgtgcttgccgaacggaagtagaaccgaacctgtctgatcgcggataaccgatccggctgatcgacagccagaataatcctgaaatgcctcctgccgacgcactatgctggcaggaggcatcatcgtatccaagtggtttgtgaaaatggaggggaccatgaacgaacagaacatcgcgttgaaactggacgatgtggaattccgtcgccgcaggcgcgtaatcctcaccaaagtcaatctggaagtcaaaaaaggcgagaaatgggtgctgttcggtcccaacggcatcggcaaatccacgttggtgcagatgatgagcacccgtggattcccatccgaaggcacagtcgacattctgggaaaccgtctgggcaaagtgaacgtgttctcctaccgcaaccgcatcggtttgagctcggccgaactcggacgtgcgttcccgccgcaggaagatcctcttgacgccatcgtgacggcgctgaccgcaaccaccggccgttggcgcgacacctatactgacgaggattacgccaaagcccgctcattgatgcgtgaattcggcatcgaatacctggaaggcaagatgatgttcaagctttccgaaggcgaacgcactcgcgtgcttatctgccgtgcgttgatggcggatcccgatttgctgattcttgacgagccgaccacgggtcttgatttgggtgggcgtgagattgctttgcgtgcgttgagtcgtgttggtgcggagcagtctgaccgcgccgtgattctggtgacgcaccgtcttgaggagattccgcaaggcttcgaccacgtggcgatcatgggacgtatcaccggcaacgaggcggacgcgtatgccgataacgtcgccggcaacgatccggcgccgggcactatcgtatatacgggtgatttggagcatggttttacttctgaacggttgagccaggtgtttggtttggatttgaaggtcacgcatgcgaatggtcgttggaacgcgtacgcggtgtgatgttgacgtcgccgtcacattgccgtcgcttcgtgccgtctgccggtatgacggcggatacggtagcataggttcgttgctgtccgtggaataatgcggtctgcaatcgtaagccatagtcgtgaaatcgtatactgaacgaacgtacgaaggagcgtgaaccatgcgtcgagggccgcttgccgccggtgaaaaagtgcagtttacggaccgcaggtcgaataaaatcaccgatcagctggtgccgggtggtgtgacgcagacttcgcatggcatcatcctgcatgatgatgtgattggccagacggaaggatccgttgtcgtgacggtgagtgcgaaacgtgaggctcaggtcaaccagacgcatccggaacgcgacgcgaacaagccgtggaaggggacgcgtgccatcggtggttgggagttcgccgtcatgcgtccgcgcttggctgactatgtgctgtccatgccgcgtggcgcgcagatcatgtatccgaaggacatcgcgcaggtcattcagctcggtgatattcgttccggtatgaacgtgctggaatccggagccggttcgggcgcgatgagcatcaatctgctggatgccgtgggggagggcggaagcctcaccaccatcgagatgcgttcggaattcgcgcgcgtcgccgaagccaacgcgacggtttactttggcgaacgtcccgcatggtgggatttgaggaccggcgatttcgattcggtcgcggctggtttgccggaacactccttcgaccgcatcatgcttgacatgcttgacccgtggaaccgtcttgaacaggcgtatcgcgtgatcgcgcctggcggcgtgctcgtcgcgtacgtcaccaccaccacgcagttgagccgtcttgccgaagcgttgcgcgaggccggttgctggaccgagccggacattcaggagactttggaacgtaattggaaggcgcaaggactggccatccgtcccgatcaccagatgattggacacaccggtttcctcatggtttctcgcgcgatggctccgggctttcaggcgttgcgtaaacgcgaccgtgccacgaaggacacgacgaccgacatcgattcgttgacgctcgaggagcgtgccgaacagcttgaggatctggaattgcgtgacatttccgatcgcaagctgcgcaaggtgctgcgtgacctcgacgcgcaggtcgaagccataaaggagtagatttagagcgtttcatgccatgtcccagcggaaaatctgagacaatggatattagatatttgaaatgcggcgctggaaccggatcggagcgtgcgattatgggaacgagcctgaagaaggtcgccaaaaagaccaaggaatacaagtatgtgctgctggcgatgcgccacgccaaaaccgagccgttcggcggcaacggcagcgacgtgggacgtgagctcaccgacaaaggacgtaagcaggccaaagccgtggccaaaggattggcggcgttcaaaatggtgcccactcgcatcgcatgctccagcgccacccgcgcccgtcagacctgcgatcgcatgctcaaggtgttcggcgacgatccgaaagtcgactaccggcaaagcctgtacgaaggcggcgtgcaatccgtgttcgacgagctcgcgcaaaccaaggaaaagcatcgcacgctgctcgtgcttggccacgaaccgaccatttcgatcgcctgccaatggctggccagcaccgaatccgatccgacgttgcttgacctgctgaatctcggcatgtccccggcctcgatcgccgtattcggctcgaacgagccattcaaccagtggcagctgcacagcggcgaactcatcgcgctgcttaccgccaaagacttcgagtagggcttgcgtgttccgggctgattcggaacgatgagcattccgcagagtgctgtgatttgacttcaagcggcttcaaggttgtatggtgctttctgaaccgatgttcagaatgatggataggaaagcccatatgaacaatcccagtgcgttccctcttggggaaccaaatgacggtttcgcccagtatttcgacggacagagctggcttgcgccggtacttgacgcgcctgaagtgtcaatccacaatgtgacgttcgaacctggatgccggaaccactggcatatccaccatcacgcggcccagattctcattgcggtcggagggcgtggctactaccagcttgagggcgaagagccgaaggagcttgaaccgggacaggccgtccgtattccgccggacgttaagcattggcacggcgccgcccctcacgaagctttcagccatttggcgttcatgattgcggatggcacgggcgacgcgacgaatgaatggctggaacccgtggaccccgacgcatacgggacattgcgttaaatccgcttgccgggctgttctgcattattgatccataaacataaatgtgtgaatatagacggcatacggactgcgttataaggacagtttataacgacactcaaattttcttgatgtcttatagctggcggttttgtgatagcttgagcgggttgcattgttcatatcagatggaggattcatgtccgctcttacttccgtctccggtttcccgcgcatcggccagaaccgtgagctgaagaaaatcatcgaagcgtattggaagggcaacaccaccctcgacgagatgcgttccaccgccaaggaactgcgcgccaagcattggaagctgcagcaggccgccgccatcgacctgattccgagcaacgacttcagctattacgaccagatgctcgacactgccatcctgctcaacgtcattccgcagcgctaccagcgtctcgccttcgagaacccggaagagaccctcttcgcaatgggccgcggctatcagggcgagaagggcgacgtgaccgccctgccgatgaagaagtggttcaccaccaactaccactacctcgtgccggaaatcgactccgccaccgacatcaagctcaacagcaccaagccgttcgacgaattcaacgaggcgaaggcgctcggcatcgccaccaagccggtgctcatcggcccgtacaccttcctcaagctcgcccgcaatccgcaggccgaggagctcgactacgacaagggcctcgtcaacgcggtcgccgcggtgtacgccgaagtcgtcgccaagttcgccgaactgggcgcgcagtggatccagatcgacgaaccgtacctcgtgctcgacaaggagccgggcgatgtcgaactgttcaagagcctgtacgccaagatcctgcccgcccgcgaaggcaaggtcaaggtgctgctcaacacctacttcggacatatcgccgacgtgtacgaaaccgtcaacctgctcggcttcgacggtatcggcctggacctgaacgaaggcaaggacgaaaacctcgccgccgtcgaaaagtacggcgtggcagaaaacaccaccatcttcgccggcgtgatcaacggccgcaacatctggcgcaacaactacgccgtgagcctcggcctggtcgacgcgctgaagcaggtcaccgccaacgtggccgtctccaccgccagctccctgctgcacgtgccgttcagcaccgaaggcgaggatggtctcgccgacgacgtgcgcaagcacttcgccttcgcagtccagaagctcgacgaactgcacgaagtcgccgtgcttgccgacgcttccgacgacgagaagaaggcatccgccgaactcgcagccaaccaggcgctgttcgacggcacccgcgtcgccgccgatcctgcggtcgccaagcgaatcgcaagccttaccgacgccgacttcgtacgtcagccggcacgtgccgaacgccagaaggagcagcgtgaggcgctgaacctgccgctgctgcccactaccaccatcggctccttcccgcaaaccaaggaagtgcgcgccgaacgcgccaagctgcgcaagggcgagatcaccaaggccgaatacgacgaattcatgaaggaccagatcgacgcctgcatcaagcatcaggaggaaatcggcctcgacgtgctcgtccacggcgaattcgaacgcaacgacatggtcgaatacttcggccagaacctcaacggcttcctgttcaccaagaacgcgtgggtgcagtcctacggcacacgttgcgtcaagcctccgatcgtgtggggcgacgtatcccgcgccaacccgatcaccgtggaatggagcgcctacgcgcagtcccgcaccgaccatgtgatgaagggcatgctcaccggtccggtcaccatcctcaactggtcctggccgcgcgaggacatcacccacgagcagcagacccagcagctcgcgctcgccatccgcgacgaagtgctcgatttggagaaggccggcatcaaggtcatccagatcgacgaggccgcactgcgcgagaagctgccgctgaggaagaccgactggcacaagaagtacctcgactgggccattccggcgttccgtctggtgcattccgccgtcaagccgaccacgcagatccacacgcacatgtgctattcggagttcaacgacatcatcaaggacatcgacgcgatggacgccgacgtgatctccttcgaagcctcccgcggcgaccttgtggtgctcgacgccatccacgacgccaacttcgaaaccgaagccggcccgggcgtgtacgacatccactctccgcgcattccgtccgaacaggagatcaaggaccgcatctacgagatcctgaagaagatggacgtcgaaaaggtgtggatcaacccggactgcggcctgaagacccgtggcaacgccgaaacctggccgagcctggagaacctcgtcacagcggccaaggccgtgcgcgccaaactcgccaagtaaggccggcatcggcaataacaggcaagatttccaaggaatcacatgcattcgccaatcttctcgctggaggtgttccctcccaagcgcaccagccctgtaggtaccatctacgatacgttggatggcctgcaggggctggaccccgacttcatctccgtcacctacggcaccggcaaatcgtccgaccgcacgttgaccgcacgcatcgcgcatacggtgaacgaatacggcattccggccgtggcgcacctgaccgcgcaataccttgacaaagacgacgtggacgaggcgctcgacctgttcgaccaagccaaagtctccggcgtgctcgctttgcgaggcgaccgtgtggaaggagccgaaccggcgggagtgttcgaccatgcgagcgatctggcggcctacatccgcgagaagcgtcctaatctcaagatctacggcgcctgctatccggaaaagcacccgcaggcggccacgcttgaggaggatatcgacaatctcaagaagaaggtcgacgcgggcgtaagccacctcatctcccagctgttctacgacaacgaggatttccttcggttcgtggacaaggctcgtgccgccggcatcgacgttccgatcgaagccggcatcatgccggtgatgaacgcgaagtcggtgctgcgcatgtcgaagatgtgcgaatcgcgtgttcctgaaaaacttgccgtcctgcttgacaagtgggggagcgacaccgcgctgcttaaagaggcgggtatcgcctacgcgtccgaacagatctgcgacttggcggcacgcggcgtcgacggcgtgcacctgtacacgatgaaccatccatgcgtcagccggcgcatctggtccaacgtcaaaccattcttcgtctgattcagacgatgcaacaaacacgaaagggatgatttccggcaactgtcggaaaccatccctttcgccatacttacggatatgaacgattactatgggaaccatggcttcttctacgcatcagtttggggtgctcgatctgattcgggcgggattgcaggatctggacacggcacgcacgctgcttgacgagttgcgcgccgacggcatcgacgacgaccggctatgcctgctgatgaaaacattggaacagacctgcgagcccgacatcgcgctacgcaacctcgtcgacatcatcaaagcgttgcaaagccaaggccgcgacttccaccaggtcatcaccgacgacgccggactcgtacgactcgtcaccgtgctcggcgtgtccgacgaaatgggcaagctcatgcgcttccgccccgaactcgtcatggccgcagccagcgactcatgcgaaagccatctgtacaaccacgcgcaacgccgcgcgcatgtcctcgaagcggttggtgccgacccggccgacaatcgcatgccaaaagccacgaaaccacttgccgaagcggcgaccgcgctacgacagacctacagaaaacagctcgccgccatcatggcgcaggacgccaccgcggacgacccaatcgaaatacaaccgagaatcagccaggaactgtccgatcttgccgacgcggccctggaaggcgcgctcgccatcgcccgcaacgaagtggacggcagcgaacacgtgcgcttcgccatcatcggcatgggcaagctcggcgcacgcgaactcaactacgtatccgacgtggacctcatctacgtggtggaaccggcggacgcggacaccaacggcatgaccctcaaccgtgtcggcaccaaaatggccaccaccctgcagcgcgtatgccaatccgtcatcatgggcgtcgccgaacctacattgtggcagatcgatggcggactgcgccccgaaggcaaggacggcccgctcgtacgcaaactcgaatcgcacgaagcctactacgaacagtgggcggaaaactgggaattccaagccctgctcaaggcccgccccgtggccggtgaccccgacctcggccaagcgtacatggacatgacccgaccgttcgtatgggccgcatccaaacgcgacaacttcgtctacgactgccagcagatgcgcaaacgagtcgaagacctcatccccgcgcccctgaaggaccgtgaaatcaaactcggccgcggaggcctacgagacgtggaattcaccgtgcagatgctccaactcgtccacggccgcgccgacgagaccctgcgcaccagctccaccctcgaatcgctgcaacgcctcgccgaaggcggatacgtctcacgcagacaagccaagaagctctcctgggactaccgcttcgaacgcgtcatggaacaccgccagcaaatgtgggcgctcaaacgcacccacctgttcccggacctcggcaaagccagtctcggcggcatcgaacgcaaacgcgacaccaacgacgacgaactcaaccacaacctcgaactgcgcagactcgcccgggccttccacatgcaccccgaggaactcgtcgacaaatacgacgaaacccgacgtgaagtgcgccacctgcacatggacatctactaccggcccatgctgcccatcaacgccggcctcgacgacgaacaagtggaactgtccgccaacgccatgcaggaacgcttcgcctccatcggattcgccgaccccgacgccgccatgcgccacgtcaccgcactgaccgccggcatctcccgtgccgcgaaaatcaaccgcatcctcctgcccgccgccctccaatggctcggcgaagggcagaaccccgacatgggactgctcaactggcgcaaactcgaagaacactttggcacggacagcgaatacctcggcttcctgcgcgactcgccgtccgccgcgcaacgcctgtgccacatcctgtccaattcgcggttcctgggcgacgcgctcaacaaatccgtcgaatccgtcacctggctcggcagcgacaacgacctgcagccacgctcacgcgaaagcctcgacgtgcagacacacgcctcactcgaacgcaacgcaggcagcatcaacgacttcgccaactccatccgcgccatgcgacgccacgaaatcgaacgcatcggactagggtggatgagcggcgtcatcgacgacaaggcgtcgctcgcaggtatgaccgacgtatacgacgcggccatcgacgcatcgctcacctgggccatccgccaccaaacgcaggaaatgggactcgacgaagcgccggcggcaatcgccgtcatcggcatgggacgctacggcggcagggaagtgaacttcagctccgacgccgacgtcatcatcatctaccggccgtccgataacgccgacgacaaccaagccaacctcttcgcacgcaaagtgcaggaagacctccgcgccatcctgcaaggaccgaccacgctcgaacccaaaatcgaactcgacatggacctgcggcccgaaggcaaaaacggacccctcgtgcgctcctacgcgtcctgcgaggaatactaccgttcctgggcgagcacatgggagcaccaggcgctcctgcgtgcgcgttacgcggcaggcgacgcggcgctcgccgaggatttcctgatgaacgtcgccgacccgctgcgctatccgaagatcgatttgacggaggcgcaggtcgccgaaatacgcaagctcaaggcgcgtatggaagccgagcgattgccgcgcggcgtgcgtagggaccgtcacctgaagctgggcaaaggtggtctgtccgacgtggaatggacgattcagctgctgcagttgcagcatgccggcgacaacgcgaacctgcgagtcaacggcacgatgcaggcgttggacgagttggagcggcgcaagctggtttccgccggcgacgccgtcgtattgcgacgcgcatggtggatgtgcacggccgcgcgcaacggcagctacctgtggagcgggcgcgtcaaccaggcggatatcctgccggatgacacgtattcgctgggaggactcgccgtctatctcggatacgacgcgaatcgcggacagcatttcgaaaacgatctgcttgccgtaatgcgcaaggcgcgcgacgtgacggaacgtctgttctacggcctttcatgaaacgattcgagcgggcgctcggtgaacacgcggtgaacgctccgggtcagtgtttcgggctatagttggctaggtcactttcagtggccaccttcaaccacaagttgcatgaaaggtgagccgttgtcctcagtactcgaaccggcggtcgaaacgccgatggtcggaaaaagcgtcatcactctcgatgatctttccattcgtcagattcaggaaatgctgcacaaagcgcagtacatcgattcccatcgtaaagaagtggcacacacctgcgaaggcagggtgcttgccactttgttttatgagccgagcacgcgcacgcgtctgagtttcgaaaccgccatgctgcgcctcggcggcaaggtgatcggtttcgccggcgcccagctcgcctccgtcaccaagggcgagacgatcgccgacacgttgaagacggtgtccaactacgtcgacgtggtggccatccgccatccgaaggaaggcgccgcgctggtcgcatcccgcgccgcctccgtgccggtcatcaacgcgggcgacggcggacacatgcatccgacgcagacgctcgccgacctggccacgcttcaatcgcgcttcggccgtgtcaccaacctgaccgtcggcctgtgcggcgatctgaccttcggccgcaccgtgcactccctgatcgaaacactgtgccgcttcggcaacgtcaacttcgtgctgatcagccccgacgagctcaagaccccgcagtacgtgcttgaccgcatcaacgccaccgaatcctgctcctacaccgaagtcaaggatctggtctccgtcatcggcgatcttgacgtgctgtacatgacccgcgtgcagaaagaacgtttcttcaacgaggacgattatctgcgtctgcgtgacacctacatcctcgacgaagccaagatggcgtacgccaagaaggacatggccgtgctgcacccgctgccgcgcgtcaacgaaatcgccgtggaagtcgacgacgatccgcgtgcagcctacttcgaacaggtcaagaacggtatgctcatgcgcatggcattggaaagctcggtggtcggtgacgaactgccgggatacgaaccgctcgcagccaaggaggttgaagcctgatggaagtcaccagcattcagaacggcatcatcatcgatcacgtgcccgccggaaccgcgctcaaggtacttgagtatctgaagatcgacccgtccaaaaccaagctcgcgttgatcatgaacaccgacagccacatgtacggcacgaaggacatcatcaaaatcgaggatgagaccgaatccatcgacctcgacgtgctcggcctcgtggcgcgcaccgcgaccgtcggcatcgtccgcggcggcaaaatcgtcgaaaagaagaagccgaccctgccggaacatgtcgtcaacatcatcaaatgcgtgaacccgcgctgcgtcaccaccaccgagcctgcggtgcagatgttccatctggtgcattccgaccgtcaggaataccgttgcgactactgcgacgaggaagcgaagttctgaaatcatgaccctcacccttcacgacatcaaggtctggaacaccggcgaagtcattgacctcgtcgtcccctccgacacggacgcgtccgtggacgcctcggcgatgaccatcgcccccggattcgaagacccgcacgtgcatttccgcgatcccggacagacctacaaggagtccatgatctccggctgcgcggcggcggcatccggcggatacacgaacgtgctcatcatgccaaacaccgtgccggccatggatggcgtgaaggtggaggccggccagccgggcgcctccgaagtgctcgacgccgaatacgacacggtcatcgattacctgcagcattacgaggccgctcatggcgtgaaactgccggtgcgctacgacctatgcgtatgcgcctcaaaggggcgtgccggccatgaggccaccgaagtggccgactggatcggctacctgcccgaacatggcgacgagcataaggacgcctaccagctggcgcatccggtgaccgccatcagcgatgacggttccgcggtgacccccagcattctcgaacaggtgttcgaaaacgtcaaggagtcgggactgtacctcatcgagcattgcgaacaccacgacaccggcgcggtcaatgacggtccggtgtcccgcaagcttggcgttccaggcattccggaggacacggaactcaaaatcgtcgaacgcgacattgacatgtcccgcaaaaccggcgtgcacgtgcacttccagcacgtcagcaccgcgatctccttcgacgccatccgcaaagccaaggccgaaggacttccgatcacctgcgagaccgcgccgcattacatcgcattgaacgacgaggcgctgcttaagtacggcactttggccaaaatgaacccgccgctgcgctccgaagcggaccgccaggccaccatcgcagccgtcgccgacggcacggtcgatttgttggccaccgaccatgcgccccacaccatggaagagaaggaactcggcttcctcgacgcgcccaacggcatcatcgggctggaatgcgcatacggcgtctgccacaaggtacttgtcgacggcggattcatttccgacgaacgtctcatcgaactcatgtccaccggtccggccgaactcatgggccacgacaaaacggacatcacggcggtgctcgacgactacgccgacgccgtgccgggagacgacgacaccaagcgcgtgcttgatctgggccgcgtgcccgaaagcgaccaggtggatctcgtggtgctgaacaccggagaggaatggaccgtcgacccggagaagttccactcctcggcacgtaacaccccattcggcggatggcaggtcaccggccggccgctcgccaccatcatcggctcgaagctggccttcagccgcatcgacaaggaggactgatggaccgtctgatcgaagccatcgaagacaagcagaatccaagcgtcgtgggactcgaccccaccgaagcgctggtgccgaagcaggtcgtggccagcttcgccgaggaaatcgccgaacaggtggaggatccgacggaagcgccggcagcccaactgtccgtcgccttcttcgaattcaaccgcgccatcatcgacgcagtagccgacatcgtcccggccgtcaaaccgcagatcgccatgtatgaggcgctcggaccagccggcatcgacgcctacagcatgacctgcgaatacgccaaacagcagggactgtacgtcctcggcgacgtcaagcgcggcgacatcggctccaccgcagccgcctacgcccaccatctgagcggtgtgaacgcgggggagcgcgctttcgacccgtggcatgaggacgcggtcaccgtgaacccctacctcggcaccgacggcatcaccccgttcgtcgaagccgccactggtgccgacaaggacatcttcgtactggtacgcacctccaatccatccagcagcgaactgcaggaactcgaactcgcctcaggcgagcgcgtgtacgagcatatcgccggcctcgtggaaggctggggagccgaaaccatcggcgcgaacgggtattcccgtgtcggcgcggtggtcggagccacccatcccgaggaaggcaaggcgttgcgggcgcgcatgccgcacacgttcttcctggtccccggttacggcgcgcagggcggtaccgcccaaggcgtggccggcatgttcgacaaagacggcatgggcgcgctcgtcaattcgtcgcgtggcatcatcggagcctggaagaagtccggcaaatacagcgaatccatgagcgcagacgatgcgctcgacttggtcgccgaatcggcgcgcgaggccgcgaaggacatgcgcgacaatctgcgcgcggtactgccgtaagctaccagaacaatcgaacgaaacacaggaaagggagtcatgaccgccgcagcaacgttcatgccgaccgtcggccaggcgagggaagcgggattcttccccagcaggcacacggtcgaaatcgtcgacaaccgcatgctggccgatggcgtgtaccgattgacattccgcgacgaattcatcgcgggacatgccaagccggcgcagttcgtcgacgtgtattccaacaatccgagcagactgatgccccgcccgttcggcgtggccgaagtggatggcgatgaggtgagccttatcttcgccgtcgtcggcaaaggcaccgccgaattctccgaattgcgtgcgggcgacaccattcgggtgatgggtcctctcggcaactccttcaacaccaaggagaacgcgaactacgtgctggtggccggcggtctcggcgtgccgccgctggtgcgcgccgcgcaggccatcgccgaatcggaggggtcgacgagcaccgcggtgttcggataccgcaacgtgcgtttcggagacggatacgtcggccggtacgcggacaagacatacagcatcgacgaatccgaaggcaatgtcgtaacgctccttgaccgtattgaaaatgaactggtgaacggcgagctgaagccggtcatcctctcatgcgggccgttgccgatgatgaaggccgtcgccgcatgggcggcgaaacgcggcatcgaggcacagctgagcttggaacagcgcatgggctgcggatacggcacatgcgtgctgtgcaccgtcgacaccgccgaaggacgattgaaggtctgctcggacggacctgtgttcacccgcgaacaattgggatggggggagtgagcatgaccgcagaacaacatgcgaacctgtacgaacagcacgaatggaagcatcccacccaggtggctggtatcccgtggaagaatccggtggcgaccgcttccggcacgttccaatatgctgccgtgcgctggttctatgacgtgagccagctgggcgccgtcaccaccaaaggcgtgtctccggtgccatgggaaggcaatcctggcatccgtactgcggaaggcccctccagcaacatcaacgccgtcggcctgcagaatcccggcgtggaccattaccttgaggacgatctgccgaaactcaaggccatcaacgccaccgtcatcgccaacgtcgccggacactgcgacgacgactacgcggaagtcgtgtccaaactcgacgattccccggccgacatgctggaaatcaacgtgagctgtccgaacgtgtccgcaggcggcatgagcgtcggcaccgacccggtggctttgagccgcctcatcaccagactgcgcaagctcaccgacaagaagatgatcgtcaaactcaccccgaacgtcaccgacatcaccgtgccggcacgagccgcggtggaaagcggagccgacgcattgagcctgatcaacacgctgctcggcatgcgcatcaacatccgcaccggcgagccggtcatcacgcacgtcaccggcggcgtgtccggcccggccgtcctgccggtcggactggccgcggtatggcgcgtgcgcgccgcattgccagaaataccgatcatcggcatcggaggcatcgactccggcgagaccgcgctcgaatacctgtatgccggcgccaacgccgtcgaagtcggcgcggccgcattgttcgagccgaccgcgccgctgcgcgtggcccgcgaactcgacgatctgctcgacgaacgtcccgaactcgccgacaagctcgccaaaggcgagacctggcgctgaaatttcgtaatcgatcaatgtaaggagaacaagcaaatgaccgcatcgctcgaccatcgtttcaccgagttcctgctggaatcgcaggcgttgaaattcggcgagttcacattgaagtccggccgcaagtcgccgtacttcatcaacgccggcgcattcaacgacggacgcaagatcgcccgtctcggcgcgttctacgccgagaagattgtcgaggagatcgaggcgggcaacctgcccaaggacatcgacaccgtgttcggccctgcctacaagggcatcccgctgggcgtgtccaccgccatcgcgctgacgtccgcccatggcatggaggtcggctacaccttcgaccgcaaggagaagaaggaccatggcgacggcggcatgatggtcggcacgcagcttgcggacggcatgaaggtcctgctcgtcgacgacgtgatgaccgccggcaccgctgtgcgcgaggtcatcccgaagctcaaggccgaggcgaacgtcgaggtcatcggcctggtactgagcgtggaccgcatggagaagaccaaggattccgacacgtccgcggtgaaggccgtcgaagccgaattcggcttcccggtgttcgccatcgccaacgtgaaggagatcttcgaagccggccagcacatccagaacgccgacggcaccccgtacgtcacaccggagatcaaggccgccgccgacgcgtacctggaacagtacggcgcctgactgcggcgttcgcgctgaaccgcgctcatcggctgtcatagtctcggatatgacagaaaggcactgtgctgctttcgggcagtacagtgccttttcgttgtggttcctctgttccggggtcagtcgatgagcgtgtagccgtggctggcgaccaccgacttgagcttctccaagtacgtttcggcggccttggacagcttcgcgcgctcattggtgatccatccgacaagcatcgtctcatcggtgtcgagcggcacggtgacgatcttctcgttgttgagatcgccgttgtcgatgccggtgcacaccgtgtagccgttcaggccgatgatgaagttcagaatcgtggcgcggtcggtcacgttgatctgcttgggggagtactccggccagacggcctcctccgcgaagaagaagctgccttcctcgccctgctcgtattggatgaacgggaacggcttcagatcgtccatggtgaccttcttcttgccggccagcggattgtcgcgcgagatgaacacgtgcaacggcgcgcggaacagcggatggaactcgagatgcttctcgcgcagcagcttgccgatcacgtccttgttgaagtcggacaggtagatgatgccgatctccgaaagcatgttcgccacctggttgatgatgtccttcgtgcgggtctcgcggatggtgaactcgtattcgtcggacttggtggagtcgatcatctccacgaacgcctccacggcgaacatgtaatgctgcgtggacacggagcacagctgtttgcggggtttcgcgttcttgtaccgttcctccagcagcgacgcctgatcgaggacctgacgcgcgtaggtgaggaattccgcgccgtccacggtcaacgcgatgccttgggaggaacgggtgaagatctcgatgccgagctcgttctcaagctccttcaccgaggagctcaacgcgggctgggatacgtacagctcgtgcgaggcctcgttcatggagccgcattccactattttgacgatgtatttcagctgaaggagggtcataacgcccatttataccagcgtcgctttacgaaacgacgatttatagcgcttcgttttgcatagtggacacgcggtcggtggatgcgcggcctacagcggacgatgatatgggcgcatggccgaggcccgttccgcgggacgcaggcgtacgtccgccgcgctcacacgcgcacgcccaaggattccaggtccctgcgcgcctggtcggcgtcgacgaaacggaaggcgtgcatgccggccgaccgcgccccggcgacgttcttcgcggtgtcgtcgaggaacacgctgctctcggggcttaggccgaaacggctcatcgccagttcgtagatgtcggcgttcggcttgtgcatcttctccacgccggagacgatggtgccctgcagcagttcggcaagctgcgggaacttctcgaatgcgaaatggaacgtctcatgggaccaattcgtcaatccccacacgccatagccggccgccttcagatcgcgcagcagccgctccatgccgggcagcatgcgtggcagcgcgtcgtcgtaatgcgcgatgtaataacggaagatcccggcgacgcgttctccctgctcggccaccacatcgggccatatcgaatcgaagtcctccccggcgtccatacggtcctcgtatccgaagaagccgcaggggtcgtcgtcggcgcagatgcggtcgacggtcgcgtcgtcgaatctgccttcaaggcatgcccgtgtccgccaatccagcaacactccgcagaaatcgaaaacgacgtcggtgatggtcggaactgcaacggtcatcgggaaacccttcttgtagcgtgcgtctgtcttccgccagtgtaccgtacccatgttcgtgaaggacgttttcgtcttcgcgtgcggcgtttcctgaaagtcattggggcggaaaggctcgcttgggttttgaaaaaggctaatctagacgttttcggcgattgcgatgattgtcatgccgaccatttcgaacatacaatcaatccgaaattaaatcaacatgttgtctgaatagacgggtgtcctagtggaaagcattaggaaggggccgacgatggcatatatcgaaatggtgcacagcttcaagcgctaccatatgggcgacatcataatcaccgccaacaacgatgtgagtttcgacatcgaacgcggcgagcttgcgatcattctgggatcatccggagccggcaaatcgacggtgctcaacatcctgagcggcatggacacgaattccgaaggcaaggtcatcatcgacggcgtcgacatctcggacttcaacgcgaagcaactgaccgattaccggcgcaacaacatcggattcgtattccagttctacaatctggtggccaacctcaccgccaaggagaacgtggaactcgcctccgaactcgtcaagaacgcggccgatccagtgcagacgctggtcgatgtgggacttggcgaccgcatcgacaatttccccgcgcagctttccggcggcgagcagcagcgcgtggccatcgcgagagccgtggcgaagaacccgaagatcctgctatgcgacgaaccgaccggcgcgctcgactaccataccggcaagcaggtgctccgcatcctgcaggacatgagccgcaaacgcggggcgacggtggtgatcgtgacgcacaactccgcgatcgcccccatcgcggacagggggatccgcatgcacgacgcccgcgtcaaatcaatcgaaaccaacgagcatccaatggacatcgaggagctggaatggtgaaacgcatgctgtggaaggacatccggcaaacactgtccaagtcgaaaggccgggtcgtgtccatcgtgtgcctcatggcgcttggctcattcgcgctggtgggactgaaggtcaccgggccggacatgcaggcgatcgccgccgacttctacgggcgtaacaacctcgccgacatcaccgtggtctccaactacggcatctccaaagacgacgagaggatcatcggcaaggccgacggcatcaaggaagtcgaatacgggtacttcaaggacgtggtcatctccggcaccgacaggagcatgcgcatctattccaaacccgatgccgtctccacctatgacgtgacggaaggacgactgccgaagcggaccggcgaaatcgcgttggacatgaaagaacgcgacagattcgccgtcggcagcaccttgaacgtcaccgagaaaacggacatcgcaggcggcaccgtgctacgccaccacaaattcaccgtcgtcggtttcgtccgggccagcgagactctgtcctgcctcaacatgggacaatccgcggccggcggcggcgagctcaaaggctatgccgtggccgttccgggagagttcgattccgacgtgaagatgatcgcccgggcgacctacgaagacaccgagggattggactactggagcgccgaataccgcgatgccgtgcagaagcataaggatcagctcgtgacgttgctcgcgaaccagccaaaagcccgcgaagcgacgatacgcagccaacagcgcaagaaaatcgacgaggccaaggacaaagtcaaaacatccaaacagcagcttgccgacgcgcaacggcagctggacgatgccaaacagcagatcgacaacgccaaggaccagttgagcgaaggcagcgccgaggcagtggaggaagggtcggcggccgcggcccagctggccacggcgcaagcgcaactggcctcggccaacgcgtcggtcgcctccggacagacgcaactgcaggcggcacagacgcaactggctcaaggacagaaccagctctccgattcatggaaccggctggcgaacggcaaaacgcagctggacgcggcgcgagaacaactcgaaacaagcaaaaccgtgctcgacaaagtcggcgcgacgctcggcaaatgggaacagaccggcatcaccggcaaactctacgaacaaatacgcggcaaatacgacatggcgatcaaccagtacaacgaagcctgcgccgaatacaacagacagctgaacgcctacaatgcgggactgcaacaataccagaacgccgtagcgcggctcgaccaaggctcgcaggcgtatcggagcaatgcggacaatctcgcacaggcatccaaacagatagccgaaaaacaaaacgagctcggcaaagcggtgtcgcaggccggcaagcaagtcgcagacggcgtcacgcagcttatccaaggccagagggacatcgacaaggccgaaacggaataccagagcaaactcgccgaattcaacgcgcagaagcccgaagccgaacgcaagatatccgaagccgaacggcagataaccctcgccgaggagaagatcgacaatctcaccgtcccggcctattccgtcagcggccgccgcgaaggcctgacctcgcaaggctaccgcgtgtacatggtcatcgaaggcatcgtggcgaaactggcggacatcttcccgatcttcctctacttcgtcgcggcgctcgtcaccttcagcaccatgggacgcatggtggacgaggaacgcaccaattccggaacgttgaaggcgctcggctacggcaacgcggatgtgatgctcaaattcaccgtatacggattcgccgcatccaccctgggcacatgcatcggcgtgctcgccggccacacgctgctgccgcttatcgtcgcccacgcatacagcgcgggattcaccatgccggacatcatgctcaaattccacccctggatcaccatggccgcattcgcacttgcatggataagcgccgtcgtgccggcatggctggccgcgtccaaggaactgcgcgaaaaaccggcgagcctactgctgcccaagccgccggccaaaggctcgaaaattcttttggaacatttcccaccactatggaaccgtctgaatttcacacacaaagtgaccgcccgtaacatcttccgatataaaacacgcatgttcatgacgatcttcggcgtatgcggagcggtatccctgctgacggccggcctcgccgtccaatcctcgatcggacagataggaaaccgacagttcgaggaactcatccactacgacctgatcgtcgccgaggaatccgacaccaacagcgcgcaacgcgaggaaatcgccacgacgctgaagggcaaaaccgtccaatcctcgacagcggtgcgctacgaggaactgtcgaaaaccgcaggcaaggagaacgataagcagtcgatcaccctgctggccaccgacgacgcatacaacttcaacgaatacctgacattacgcgaccgcaaaacacaccaaccacagatactggtcaacaatggcgcggtaatctccgaacggctcgccgaaatgctcaacgtctcggtcggcgacaccttcacggtaaacgacgaaaacggcgcgcaacgcaccatcaaagtcgccggcatcagcgaaatgtacatcggccatttcatattcatgaacgcgcaatgctacgaacacgtgttcggcgaccagtacagcacaaacgcatacatggtcagactgaaagaccacagcaacgccaacacggaacgccaaggcgccaaattcatgaaactggccgccgtgcgcggcgtcgtgcagaacacgacgcagaagaacatggtgtccacaatcgtgggatcgctcaaccagatcatggaagtgctgattctcgtggccgtgctgctggccgtggtgatcctctacaacctgaccaacctcaacgtgtcggaacgcatacgcgagctatccacgatcaaagtgctcggcttccacaccagcgagaccacgatgtacatctaccgcgaaacgatcctgctgtcactgctgggcatactcgccggatacggcttcggagaatggctgcaccgatacatcatcaccgaagtgccacccgacgaagtcatgttcgaccccgccatcagcaggatcgcattggcggccccgaccatcgtcgtggccgtggtactagccgtgctcggctggatcgtataccgccagctcgaaacggtggacatgctcgaagcattgaaatcagtggaatgaccctccacgaaacggtcagcggagcagctcgccaaaagcccggggaacagccgcgacgacatcaccggcaacaatcggatgcccgatcgcgctcgccggagtcttgcccgcatgcccatacagatgcggacgatgccatccgcgctgctccgacccgctggccatcgcgccggcaagcccatgcatatacgcggcggccgcggcgacctccggaaccaaagccggatcgtcggacagcatgtcgtcctgctgcgccagcaacgcgcccaacacgccggccaacacatcgcccgaaccggcggtggccatccaggcaggcgcgcgcccggacaggatgatccgcgtgttcccatctccatcagctccaaccacaatggtgaccgcgcccttaagcagcaccgtggcccccgtaagctcatgcgcgcgcaacgccgcccgcaatggccgggcctccacccactgcctggaaacaacatcggccatatcggcatccaaccgattcagtaatgcggccaattcgccggcatgcggagtgataacgacctgcggcacaacatggcacggcagcaaatccaacgcgccggcatcaaccacaatgggaggcatgccctccgcccgctcgttccgcgagccatcgccatcctccaacgcgtaatgatccagcagcgcggcaatggtcgcacgttgcatgtcatcaccggaagcaacgtcaccctcgacgggcacgccggatccaaccacccacgactgcacccggcccttgcccaacacagcctccggcaacacggacaatatcatatcctgcgcacgctgtggccccagataacgcaccatgcccacattcgcgcacgccgcggccctcgccgacaacacggcagcacccggataccgcgccgaaccagtcaccaaaccaaccactccacgcgaatacttgccatccgcaagagacggaagacgaaccgaatccgccacaaaatcgccatccgtcatctcggcaaacggaacagcatcatcgacatcgaaaccgaaatcgaccaacgtgatccgtccgcaagcatacgaagccggcggcaccatcgcacacggcttcatcgcaccgaacgtcaccgtcacatccgcaggaatatacggccccggcaacgaaccatcatcaacacccacacccgacggcgcatcgacggccaccaccaacggcaaatcagcggaagggtcattgttcggcaacgcaggcttgtccggcaacacgccatccatacccaaagacgaagccaacgtgccagcgacaccacgcaacgcgccgaccacgccaatccccgtcatagcatcaagcaccacatgcgcaccccgcgcacactcgaccgcagcctgcagccgctcaccagcctcacccgcggaaaaaccagacgtgcacccagaaatatcagccgccggatccaacaccaacacacgcccacccgcacgaacaaacgccctaaacgcatcctcatgcaacgaacggccaacagcaaccgcggtaacctgcgcaccctcacgcgccaactcagcccccgcatacaagccatcgccaccattgtccccagcgccagccaacaccgtgacccgcgcatcctcaacatccaaatcctcatcatcaagcaacgacaacgtcacacgagccaccgcagaagcagccatacgcatcaacggcacaccatcatccaacaaaggacgctccaactgccggacaacatcggcggaataggaactatacaacaacgtctgcaaacggtcggcatcatcggagacatccatggaaaatcctttccctcggcgtggaaccacaaacaccactttagtcgtatattaaaaacaacaaacaaaaacggcatggacgccaaacaagaaaacggagcggaacatggcatacatcgaaatgaaaaacagcaccaagctctaccacatgggatccaccaccatcaccgccaacgacaacgtctccttcaccatcgaacaaggcgaactcgccatcatcctcggcgcatccggcgcaggcaaatcaacagtgctcaacatcctaggaggcatggacaccaacacctcaggacaagtaatcatcgacggcaaagacatctccaactacacacccaaacaactcaccgcataccgccgcaccgacatcggcttcgtattccagttctacaacctcgtcgccaacctcaccgcacgcgaaaacgtagaactcgcctcacaaatcgttcccgacgcacaagacgcccgacaggcgctcgccgacgtagggcttgcggaccgcgtcgacaattttcccgcgcagttgtcgggcggcgagcagcagcgtgtggcgatcgctcgagcggtggcgaagaatccgaagattctgctgtgtgacgaaccgaccggcgcgcttgactacaacaccggcaagcaagtgctccgcattctgcaggacatgagccgcaagaagggcgcgacagtggtgatcgtgacgcataattctgcgattgcgccgattgcggaccgtgtaattcgcatgcatgatggacgtgtgtcatcgattgaggtcaacgagcatccgatggatatcgaagagcttgaatggtgacgttgcgacacgctgtgatacgtatgatttgcgtaaatggctgattcgtgtaatatatgtgacttgtgcacggaagctaagtcttccggtggaaacattcctgcgtagctcagttggcagagcatccgactgttaatcggacggtcactggttcaagcccagtcgcaggagccaaggtagaaacccttacgcgagtagggttcagccgtagttgcgggaacggttgcggaagcgtccgaaatggtcattctctccgattctcagacaaactcgaaaaaccagcccaaaaaacacacgaaaaaggcccgcgacacgccgtaacagcaaattcgcacgtcaggtgggaaggttcatgaaaccctgagagaacgccatccaaacgtctcacagggcataacagccggtatcatgcggaaccatccaaatccgacacgcccatgccgttctctccaaaatagggagagaacacgatgcatgagccgtccggaaccacgaaggccgccacacggcatagggaaccatgtggcggccttcatagacataaccgcaatcagcaatctcaggaaaacccaatcaagcaggtacaaccctaataatcttctttatttggattgcgtcatcatgttgaccgaacacgaggacattcgaccatcgtggtcgaaaacgcggtcataaaacggtcaaaaaaggtcgaatggcacaaccgtcatcatggccgaatcagacgccaaggcactccctggcccatcgttccactgcggcattctccgcatcgtcacccagtaggagtagaaacccagcgttcttaccaagcgaagcaggttcgatggtcttgatgatgccgcgatcacgcaggaacacccaggcatcgctgatgctcttctggatactgttctcacgggtcttcatcttcgcttccgcattaccgcccatcgcctgttcgggagtgagcatcaccattccaagcgcatccgaaatagcacgccatccaagcgtgtaatagcggcacggcacctgcttatccatgagcttcttcggaggacaattgttctcgctatcccaatcgtatgtttgcgaagccatgaacatgaggacgagttcggcgttcttgttgagggtcatgttgtcgccgcgtcgtatcgccatgcgtccggcacggttgacgtcgtatacggcttgcatgttcttgtagcccatattttccacgtgtctttccctccatgcctagcgctatgctgatgcacggagaatctatgcaaactggttttccgattgcccttgtcgctgttcgagagcggcaagggctttttgctactttcgcctataactctaactctacacatggatataattacaactactgtcgggtagtagatactgatagtttgtcggtgtagctccagttacatgtatataagtagttacatgtatataagtatgtacatggttatacattcttcttacattgtgcgtttgccatgattttgccaattaaaaagcacaaacggtcagaaagagggtatgaaaaacccgcctgcaacaaaacagacgggcacgagaaaaacatgattcacgcaggactgctggcgagagtgataatcatagtcaggaagcatacgccgacagcgactccaatcacaatccagcaatttcgcacatgaatggaattacgcgactcgatatagtccagagccttcgccctcacattccgctcgatggcatctggtgcggaatcggtcttggccgtaatctcatacaattcatgcaacgtcggcttgccgccgtccacatcgtcgatgcgttccaactcatactgggtacgccagtcaatcaacccggacatgcgaatgccgttccgcaccgccgtctggatcagcagaacgaacgcggccataccgatggcgataccggcgataacgcatataatttccatgatgtcctccttactctcctgcaatatgtctcaacaaggattatccccccaattgatggctgatgaatcatgggcgttttgcaaacaagccatccttgagaatctgccggtaatccgtaagaacctgcatggtcacgtccagctccgccgccatatgccatgtgtcgccgtcccacagctcttcggacatggcgaactcggccgggcttatcagcatcaacgccgtctcgcgccgcgccctacgctcgcacttcacgccgaaccgcgtgccgcagccaagatcacgatacttcgcgtgcacaagctcatggcacagggtgcagagcctctgccggtcgttcaaccagtcggcaagccaaatcgtccgcagccggtcgcagtacaggccgcaggtagtgccaggaatatcggattccaaaaccttcaaacccatgtgctcggcctgacgttccaaaacgtcgatggtgattcgagacattgttcccttcgtattattaggcggcggcatcacgagtgaataccgccgccatattcattactgtcgtcagtcttccggtgtttcggcttcgagtctcgcgttcggatcgtcgttcgcggccatgtcgaactcttcgcggtagatgatcggactgttcacccagtcggcgtccgcgttttccttgagacggcgtgcgagttcctgaagcagctcgtcattcgaagcgtcatgcaatctcgcgacggtctctccgctggtcatctcgtcggctcttatatatccgaactcaaccagagcttctacaggggacttgtggtaggcgcgtgcaataagaatgacgttctcggcgctgaacccaagggcattgttgtattgcctccaagcggttgtcttgatgattcccgctttgagggctacttcggcgatggtgtcgccttggactgtttctttgaaccatgtttctttattcatggtttcattatgcaaccaaagcggttgcaagtcaacacgccgagcgagttgcgaaataaaaaaaaactgttgcatgatgtaaccacaagttgcaaaaagaaattcaaggttgcgaaaggaatcactgatggctgaatacaaaatgcagttccgagacggcttcctagaccgaaccaaacaaatgagcggcctcaaaacggacgaagccttcgccggggcaataggagtcagcgaaagcgtcctagccagagccaaaaaaccaacgaatgcacaccactcatgctcataggactctacaaagcattcggcttccaacccggagaaatcgcccaaatcaaacaaaccgcctaaccacaccacacacgccaacgatcaaaaggacaataatgaacagcaagaaaagcaggacgctgagattcacactctcggctgaatgttcagttatcgccgccagggcggttcgagccacctctgtgcaccggggtgaacggccatgacggcgggcggtttattgacatgcccgggtcgcagtgaatcagtcgtcgttgatcatcagctcgaggtcgccgaaaacctcctcgtaacatgcagggctgagatcgtcgaagcacgtagcgccatggcggcggaagacggactcggctgtctcgctcccatacatggagcacaccatgtccgtatcgttctcgatgttgatccgccacatctctttgtcatctgttgtcactgttgacctccagtcttgatgcggcgttccagcccataggcacgccttgtgtatggtttgcacatgcacgccatcgtgtgggccactggtgatcggccagtgcacgagtgacgtgtgattggtcgggaagtcgaaagatatttcgcgttcgcaaaaataaatagacgtttgcgtgggcacgtgataaaatatccttgtgttcccattcatgagaggaaggccgcggccgcttgcctttcaatcactaaggtgagtgtaagaaatcggaccttttgcaacagatacatgcgcggacatttgaggacataatttgtccactcaggagggaggtggaagcgccttgagattttgtgaattcgccaaattcatgcatgagaattacgaggcgaatgcgaatgacagtaaattcgtatccatattgattgatgccatcctcgatgaatccgcattggagaagggaggaaacccgaatccgatttatgagctcagcgcgaatacgagactcgcttattacagcggcaagcgccagatttcacaaaggaaagccgcgcagattgttccaaatctgtccgagcaatctttcgacaactttgtgagcgactattcaatggatgccctcgatcacatgcgtgacaaactgggtgagtacgggttcgacgtcgaaccgtatgaagtcggcaaggcatgcgcgaacatccttgctcagatcatcaaacgccggtccgaaggactatcggatgatgtgaccaagcttgactacaagcgactggaaaagggacagagattaaaaaacatcgcccccgcgtcgattgaacgcagaggcgacaagctggaaatcgcaggagagaccatcaccatcaaccaggctctagtgccggacagcatcgcggaacaggaacttgaatacatacacgccctgtatgaggtcttcgccgagaaactcaatcgggagaatttcaccaaggatgacatgccgttgttgaacaggggcatgcgcgaaaacttccgtgaacaacgggaagcgtattacagtgccgtgagcgtcgaacgctccgtacgggacatgttcaccgacggggaggacgaattccaaatactgaaggacgacgcatggcgcggtatcgacactacatactggaaggactacccggatggctacgcccgtctgaatgctgtgctggaaaaggtgacgagcacatcgcttgaccgctccatcctcagccagatgcgcaacctgatcgggaatcttgaaaagaaaggcatctgccacatcctggtgaatgacgggacaatcgaatcgtgggtgcatgtcaatgactgacaggattttcaacactccgtttgagatgtcgctgcacgtcgtactgctcctgggggtcattcatgaaagagcgacccttgacaggatcgcggaatacgttttcatcaccgtgcgcgccggggaattcggacttgatgacggattcctgaacggtgacagcattttcgcgtttggtgagctcgccgcaaagcgggaactggtgagagaagccctgaagggccttgttgtggatggcgtggtagatgtcactgacggcaatgagggaatcacctattccctgaccgattcagggcgcggattggacgaaggactcgtgtctgaatatgcgagccgatatcggacggtgatgaaaaaggtgaacagaagatacaggaacaaatccgatgtcgaattggccgggataataaatcggcagtccacgaagatttcaaagaggtagcgttatgcctggattctatataaagaaggtcactgcgaaaagtgcggaaaaaggcgacgccaacgtcacctttggaaaaggtctgaacatcatccaagggcgatctgacagcggaaagacctgcgtggcgaactgcatagattttatttacggcggccagaccagtaggccgttcaaggactccgcgcagtacgacggtgtcaccatgatcgtggcggcaaatgatgagccgggagatgtcacgctgcgacgcaccgttggcaagaaccaggtggaggttgacagcacggtcgctgggattgaaagcggtatctatgatgtctcgccgaggaagaacgccaaaaacccgccgttgaatgaagtatggctcaggcttataggtaccgaccctgatgtaaggatcgtggcgaactccagattcgaaaccaaaaggctcacatggaagaatcttctgagggtcttttaccttgacgaagggcgcgtggatgacgcggaatccatagtcgagccgagccatcgctacatggagaacaccctcttcctttctgcgcttctttatttgtttacaggacgaacgttcacggaaactgacgctcaggaaaagagtgaaatcaaaaatgcccgtcgcaaggctgtaaaggattacgtgaacaggaagatacaggacgccgcagctaggaaggcggagctaggagagaagctgcatcttttcgacgggatcgacatagacgcccagatcgaagaagcgacaaacgcgcttgacgagatacgacggaaaatcgaccgggcgctggaagggagccaacggatactctcgtccatatcatccgaagagcagcggatcgccgaatgcaatgtgctgctgaacaggtacaaccggctatccgatcaatacaaggcagatatccagaggctatcgctcatagcggagggcgaggaatcatacgaaggcataaatccgcccctgctctgcccatactgtgataatccgatcactcctcgcaagagacagacatacatggagtccgctcgcatcaccatggaaaggacaatggatcagctcaacggactcgtcgatactgaaaaggatgtgaaagagcaaaagaaggaatcggaaagcaacctggagaaactgaaatccgaacgtgattctctggaagccaaaatcaagatggagttaaggccgcaggaatcgaagcagctggacatcgtgcgctcctacaaagcttatctgcaagtcacggcggagattggcgtcatcgagtcgtattccgccgacttcggccgggatctcgatgatattgagaacgagcaaaagaacgacaagcccgctgagtaccatccgaaagagtactttccggatgacttcgtcccagcaatgtccggatacgctcaggagattctcgaggagtgccattactcagggttgctcaaggcgaacttcgatcttacaaaattcgatatcgtggtcaacggtgaagacaagggaacaagccatggcaagggctatcggtcgtatctgaataccgttatgattctgatgctaaggaagtacctggcgaatcacgcgaagttcaatccaaggtcattcataatcgacacccctcttcacggctttgatgacggcttggacgaagacattccggacagcatgcgcgccggactctatcggtatttcatggctcatcaagacgaggggcaactcataatcatcgagaacctagaccacatccctcacctcgactatgaggccagtgatgcgacggtcaccacgtttgaaaaaacaaacgaaccaggcaaacgatacggattcctgaacggtgtgaaataaaaaacacatacgaataaaggcacggaggcctgcaaatgcacttcagttacaacaagctgttcaaacttatgatcgaccgcaacatcaagaaaaaagagctgagcgagatgagcgacgtcagcgccacctcgatagcgaaactgggcaaaggcggaaatgtgaacacgggcgttctgcttcgcatatgcaacgccttgaactgtgatgtcggagacatcatggagttcgtgcctgataagaagcaagagtcggtagctgacgacgggaagacatcagctacctcccactagtttgacgaggaacttgccgacgcctttcaggctcgcgcccgccgcgaagttcgtgggtgtggaccagtcggcgagcagatcttcctcccgcctgctgaccggcagaccggactcgccccgcagatagcgttgtacctcggtgcgggtcagggcgccgagcaccttgatttttgaacgttccacgaagccgcgcgctttctggttcgcgccggtcgtgtccagacacatgaggtcggcgaaggtgtgggtgatcatgatctgaccgacgccccactgccggttgagacgggtgagcaaatcgagccggtcaaccatgagcgggcttgccctgagcgcccggtgcatctcatcgagtacgatgacatggttgcgtcgaggcgacagacccgcgtcggcgagcatgtccgcggcgttcttggcggcgaatgcggtgctccatgtggcggcgagtaccgcggcgaccacatcatcgccagcctgcgcgagggcgctgatatcgaaatcaactggacgcgacaggtcgatatgctccgtggtctgctcgctgaacagtcggccgaaccgtcccatcggattggcgagcccgtgcaggctggcaagcaggtcgcgcacagcatgctgataggcggcatcgtcctccggggcgtcgaatacggccgccgcgcgcacttcggcagggccctgacggatcaagtcgcgtaaatcggcgatgacgggtggcagagcctgatcgcgcgtacgctcatgcaggatgcgcagtgccgtggataggacattggattccacgtcggacaaggtgcggcgcccttcctcgcggccggtgcggctgatggtcagcagcacctccatcaacgccgaccggcgttcatgccagtccgcggtcaagtcggcctgtgcctgtccggacagctgtcgaagcaccgtgtggatgccgcccgggtcgagcgggttgatcgaaccgatcccggaacctagacggatgacctgcccgccaagcagccgggtcaagtccgcgtaatcgggcttcagatcgccggggataatcgcatgcgcgccaagagcggccatgtcccacacctgtcggcggacgaacgttgatttgccgatggccggcagtcccatcacgaacatgctgggctgttcgatgatgcctgcacggaaccagctgatcggatcgcaacacaccgcggctccggtcatgagcgaccggccgaccggtacacccttcgaccggcaacgccatgtccacagcgaacggccagaacccgccgcacacctgcgtactcgtgccgaagaactcatcgaccgaaggcagtcttccgccttgcccgccgccgcgtaccgcaagacctcgccatgtacggcggaccgccggccgtgacaagtcggcacgcagcagcggcatatccggatccatgcctgttctatcgtccgtgttcttccgtgctggactcatgccagtgcctccatcatgctcggcggcgcgtagttacgcaggttcacgcccagcggcagacatgcagcgaaacccgtgtcctgtgcgccatagcacggccgcaaatcgattttcgcggcccctgcggcgccttcgaccacatgcgaggcggccgccaagcgcagcgcctcatcctcaccggcggtgacactgacggtgaccagcatcccgaagaacacaatcgccgcaccctggttcgtcttcacggcctgacggttcgccttgccaatctggctcatggcgctgacactcgcacgcttttcctgactgacctggttcgccgcacgctgacggttctgttccgcaaggaacgcggtccggtcaggcggcaagatatggaacagcacggtgacacgcttcctgtcgcagtcatcgagcggccctaacaagcgtgccagcgtatcggcggtcacattgcttgcaggcggatcacacatctgccacgtccgggacacggcggaatcatgacggtaccagtcccaatgcgcctcgcatgccacagggccggcatcgcgccacgcgacatgcggatacccgtcctgactgtcgaacgcgtcggaagccgcgggatcataggcgagccggataagccttgcagtctcctgcgcatcaagacagcggggggaaccaccgccggcggcaccgatccttgcctggatatcggggataagctgcccgatacggcgtgccgcctcctccgcttgcagatacttgccgtcacgcgcattccggtaccggaatgtgagcgtgagcagcacgtcgcttcgcgcgccgcccgtcgcatacaaatccatgacctgtgccatcgcacgggccgccagatcgggggcgtcatccacgattctgcgtgacagctgccggcggaaccgtatccctgaatccggacttgtatccacggtgacggccatctgcatgacccctagctcggaacccaacgcctccatgagtcccgcccagccggcgacccaagcatcctcgacatcatcgtccgccaagcccgcgccctgcggctggcaagccatgatcaggctgtattcgccggtatgcgcgtgatggacgagcgtaagcctgcggccgaacccgtcactcgcctccacaagcgagaccttgtgcaggatccccggcaacagacaggaaccatgctcttcgaatgacagcaggccggaacgatacaaggcacgaccggaacgcacggaagccaatgagcacgccgctcaacggtacggtccagaacattcctatgctgacggtcacggaccgccaacaccatgacgatacccagacccacgacaccgaacacgagcgccgccacgacattcgccatggacagcatgagcgtgacggccagcacgccgaacccgatcatcgtcaacggcctgctgatgttgcggataccgccgcggatcggccgcatccagtcgccatatgtggtattcgatgccatcagaactccttaccgtgctcctgcttggctttgccgttcctcgcgccctgcggctcggcacttgcacccggcacgcccgtggcgcgggcgccggatggcaggggcggattcgacgctgcatgccgtggtgcggcagtcgatggcataggcggtgctgaggatgcggcggacgcggcaccttcaggcaccgcctgtaccggtgatgcggctgacggtgcaggcgattcaggctgatatgccgatgatgtctgagcgccgccggtagtggcaggggagccggatgcaccttgcggtggctgggattccatcgaagcccccgacctgacaccaccagacgggggcgagacatcttctccgccaccggacccggacatacgggcggctgccgtcgcaccggtcgtggccgccgctggcttcgccccctgtggcgtgccgccggatctgaacgcgctgcgcaagcttccggccgccgctttccctccgcccatcatcgccttgccggcaagtgtcacgctggcaccggcgataccgcccaagacaccgcccatgagcccctgtccgccgccggcgacgcttgaagcgaccgccggggttacgagcttgaccatcgccggcaacaggacgattgtgctgatcgtcagcatcagcgtgatggcctcgctgtcgtcgctcgcaccggcggtgctcatgatcgcgcatccggttgccatgaccaacgcggcgaccggcttgtacaagaggaacgcgaccagccagcccataatccgggagaacgcctgacggcccgactccgtccaactcatcgccgcccataccggcgccacgcccaccaagatcggcagcatgccggcacgcagatagcagaagatcttgctgaccatcgaacaaacccacacgacaatcgtcagcagcagggcgagcggaccgtccaacgcgaagaactggctcgcggcaagcatgttatgctgccacgcgtcgttcatcatcgaggacgcatccctgagtacgccggcagtccattcgtccactgtgccttggaacaggtcgacggccccggcaagacacacgctggtcaacatcgccgtgacgaacgccttacctaacgggacaagcccccgcccctcctgcatggtcaccagacggaagcctgcggcaaggacacccgcgaccgcggcgatcagcaggaacggatcgacctgaagtcgcacccaatccgacaggaagaatcccgtgcctgaacccggcgaccatgactgcatgccgggtgtccgcccggtatcgctgttgctcgcttgggcgaagaacgtcagtgcgatggacgcgcatgaagaaccgaggaacacgccgaggaagatccatccgatcttgccgagcagttgcccgtccccgcctgatgccccgccgccgatcgaccacacgagccgcgcgcccaccaccatgaggctgattgcggcggcgacgacaagaatgccttgcgcgaccttgagataccggttcacgttcgtatcccacgacgagtagttgggggaggcgttcgcgcgcagtgtcgccacgccttggctgtccgctttcagcgtgttgcggctggttgtcggccattcgatggtgccttgcgattgcttgcggtacatgccccacagggtgcgttccagccagctgagctttctggtcttcacacaggcatgccggccaccgtcccagttccatgtgccttgtgtggggctttccgcctggctggtgttcgacaacgccatgcactggtaggacggctggcgtttcatcagttcgcgtgacgtgtccttcgtgccggagcatccgcgcccctgaccgcaacgcacccactcgatctgggcgtcgccgatgagcttgccgagcccgccgttgggcacttgcatcacgtcggttacctgcgtgtccgcaacttgttcgtcaccgaacttcaaatcgccggtgaaatcactgaaatccgatccaccgcacccggcgagcagcggtagcgcggccagcgcgagcagcagcgccaacgccccggcacgtgtacggcggccgcgcatcagcagctctccgaaatcgacaggccgagcgcgcccatgaaactcaatgccccggagacaacgaagatgccgaccacccagttgatgagcttgtcgaacgtgtcatcacggtcgggaaccccgttaccctgctggcgcaggacatgcacgccgatacgaatcagcgcgacaatcgcgacaaccaggccgagcgccttcacccagccgagcgccgtggagacaggtgacgagaagcccggcggcaggcaggcgttcggattctccggttgggcgagacgtgctgtcacgacggtgactgccctccgtccggcgacggcgagagcggtgagcgtgtggatcatcatggttttctccttctggttaagtgtgctgagcctgttcttatcctgcctgtccggttgggggctcaggggacgctggttctacgcttccgcctgtcaagtccttgagtatcctgtggtaggcgctcgggtaacagtccgggaaaccatccaggtcgagtccgccaatccacggcagacgccacaaggcaggcgccgcagaacccaccagcaggtaggcgcggcgcaattcacgcggtgtgcgtcgtgcaggcattgtcaccgcaagcccaagaagctgggtctgcccgaacaatccgcgcctccacgcgtccaacagtgcgcgggccgcttcgagcccgcgccccgtgcacatcgcgcacagcacgatacggctgggttgtgcggggtcacggctgacgggcagcgttcgaccggcattcgcatacgatgccggactgctgcgtaaaatggttgtgcatccagcgccgccatgtgcggcgacaagccacacgcgattcgtggccggtgctttgaaaatcgggagcggtgattccgccagaccgtccacttgcccggacggcttgagcaaccgggctgcagccgctggcatgggtatcgatggtatcgtggtgccgcccatgttggaaggtgcctcatgtctgactggacccgtggaagatggcagcggcactcgtggcagcggtggcggtgatgacggtacaggcggcaccggtgatgccggcaggggaggcgggcaagtcggcacagtcgggttgcacagtagacgggacaactgacttggagtgaccgtgactccttgctccgcgtgtccgtagacggaatccgcgttcatcgtggcaaccttccgctcataggaggcatccccaaggacatggcatcttcgttctcacgggtgagtgaatcggtgtgttcctgccgcacgttcgcagggcagattccgtcaatcagcgcgattgacaggttcatgcgcagcggatccgtgggcgccacatggaacaaaccatccatgaaatgcttcaccaaggcgggcgggtcgccttccaagtaactgattgccgcggccacacgcaacgcgccgtacgacttggacatcggtcgcacaagatcggcgatgtcctcgaacaggtggggaacggactgatgccaggccgtggccatttggtgatacacgtcatgcgatgggtcgtcgaacacgcgtgacaggtgtgcgaacacccggtcaggcccatgaccggtcgcacgtgctatcacctcgaattcttctctgctgaggtttgggacggtcgctttcatgactgtcgcgtcgaacagcccccagtccgagttcagcgtaatggccgccaatctcagccggtcatccaacagctggttttctttggtgcgcacctgtcctgtgcgcatccgctcgaacaagtcccacatggtgtcggagtgcgtcatcatggctccttttcttggaatattgacggaatattgcttggtgcctccgccagggatcgaacccggacagtcgtggtgcgagaaggttaatgggatagggttccacgattgcgcgccgatgccggagacaaagattctgctgcacaatgcatggcagcgtttgtggggtcaacggcagtgtttgcctgacgtggtgtcggaacggatggcaagcatcacacagccggcgaaactcgtgagaacacaaagaaccagtagccccatgatgatggcatcggttcgggtaaggccggtcacttgatatccaatccagtcaccggcacctggctcaatctgcgcgtctacgcacggggttgcgtcatcgattgtgactggttgcatggtgttggttggcgcggtgctaggggtggggattagtgtttcggtttcacaaggcatcggctctcctgtctgctcaagatatcgatatgcatcagcatcgggcaatattcagcaatagacgggacggacgttctaccatcgcgaaagatgcatggcgaacacagtctgtaaacaatgaagttggcgtcttgtgcgattcatccctggaagattgatacgcaacgaaatgacagatgatgggaatccaggtggcggcagacggcttgaccggatggtcattggttcaagcccagtcgcaggagccattcgaaaaatccccttggaaacaaggggatttttttcattttcaacgactcttggcatttttggccacccttcatgtttatccgtcggcggaagccgtggttcgtccagccgtccatgcgtatgatgaatgcaccgggtcaatcaaacaaaggaaggaagtccatcatgtgcactggcgttcgtttctccgacgaagagggaaacatgtatttcggccgcaacctcgactggagcttctcatacggcgaaagcatcctggccactccacgcggctaccactacgacaacgtgttcggcgcgagcggcaaagccacgccgaacgcggtgatcggcgtgggcgtggtcatggccgaccgtccgatgtatttcgactgcgccaacgagcatggtctggccatcgcgggattgaatttccccggctacgcggagttcgtgcatgagccggtcgaaggcaccgacaacgtcgcgaccttcgaattcccgctgtgggtggcacgcaatttcgattccgtcgacgaagtcgaggaggcgttgaagaacgtgaccctcgtctcccagatcgtgcccggccagcaggagtcgctgctgcattggatcatcggcgacagcgagcgcagcatcgtcgtcgaacagatggcggacggcatgcatgtgcaccatgacgacgtagacgtgctgaccaaccagccgacgtttggcttccatatggagaatctgcgcaactacatgtgcgtcggcaacgagatggccgagccggccacgtggggcaaggcgtccctgtccgcttggggcgcgggtgtgagcatgcatggcattccgggcgatgtgagctccccgtcgcgtttcgtgcgtgtggcttatgccaacacgcattatccgcagcaggaaggcgaggcggccaacgtgtctcgcctgttccacacccttggttccgtgcagatggttgacggcatggcgaagatgggcaacggccagttcgaacgcacgctgttcaccagcggatattcgtccaagaccaacacatactacatgaacacgtatgatgatcccgccatccgctcctacgcgatggccgatttcgacatggattcctcggagctgatcaccgccgcctgagcatgcgtgggctttttcgtccgtcggttcccatacagacggacgaaaaagccgcacgattgccgaaaaggacatgaaaatggagtcgtgcgacagatccacttttcggataccggctcttccattgcccgctcaatgccgtttgacgtcggaccaatacgacacgccggaatatggacttcgagcactttaagtttttagagtgcggggtatgagcaatacgacgaccacctggcattcgatccgtgaggcgtccatgatttccggactgcccgaatcgacgttgcgttattacgagcagatcggcatcatcgatccgatcgcccgcgatccgagttcaggccaccgagtctattcggacaaggacatcgaatcgctgaccaccatcgcatgcctggcggcgacgggcatgccgcttgaatcgatgcgcgaatacctgaagaaccgtttcgacggtccggaaggcgcccgacggcagatcgaactgctcgacgcgcaatcgctgcgtctggccgcgaaagccgaggccctgcgcatccagcaggcgtacgtgtcgctcaaatcgctctattggcgcgccatcgccgaaggacacgaggatgaggccaaccgaattctcgaggaaaacaaagacgtcatcgaaaacgtcaagaaacagcccggcaagggcgcgatcgcacgctgaacattcagacgacgatggccgctatccgcacgcaacatttccgacgatagaatgaacgcggcatgcggcgcgaagacatcgaatggaaaggaagccatgttcgaggaactgcataggaagatgaacgcgttctggaacaacgacaggacgctgtcgcagaccgatccggaatatgtcaagctgttttccgacttcgcttacggggaagtggtgaacgagccgggcgcgaaccatcccgatctggacgaccagacccgctcactggcgatcctcgcggctctggtcggctgccagggtctcgacgcgttcgaaatgatgctgccggtcgcctacgagacaggactgacgtccgtggccatcaaggagatgatctaccaagccaccgcatactgcggattcgggagaaccctgccgttcctgaagaagctcaacgttttccttggagccgcgaacgtgcatctgccgctggagccgcagggcacgaccacgtcggagacccgcgcgcaggccggagaggacaagcaggtcgagatcttcggcgagaacatgcgcggattcgcgcaatccggaccggaggagacccggcacatcaacaagtggctggccgacaactgcttcggcgactactacactcgcggcggactcgacacccgcgagcgcgaaatggtcacgttgtgtttcctggccgcgcagggtggttgcgaaccgcagcttacggcgcatgccaaggcgaatatggtcgtcggcaatgagaaggcgtttctaatcgcggtggtctcgcagtgcatgccgtatatcggctatccgcgtacgttgaacgcgattcgttgcatcgatgaggctgtgaagggctgacctgcccgttaaaaacgccggcaaacaaacaaagggctatccgccgaacaagacggatagcccttccttatagctgattgtggatggcgtgctgtgtttactcgccccacacgtccttggcgatggattggacgagtgcgatcttggcccactgctggtcttcggtgagcttgttgccttcctgggtggaggcgaagccgcactgggtggacaggcacaggcggtcgagcggaatgtactgggtggcttcctggatgcgggccttgatggtgtccggatcctcaaggtcgggcttcttggaggtgatcaggccgagcacgaccttcttgtcgccggagacttcggcgagcggcgcgaaatcgccggaacggtcgtcgtcgaactcgaggtagtaggcgtccacgttctcctcgccgaacagtttggccgcgaccggcgcgtagcctccggaggaaagccaggtggagtggaagttgccgcggcacacgtgggtgttgatgaccaggtcgtccggctggtcggcgatcacggcgttgatgacgtcgaggttctcctgctgcaggcgtagcgcgtcctcgtcgctccagccgagacgttcgcgtacgctcgcatcgcacaggcgggtccaggtgcagtcgtcgaactgcacgttgcggcagccggcggcatacaggtcggcgatgacctggcggtaggcggcgacgatgtcggcggtcagctcgtcatcgttcttgtagaactcgtcatacgggtaggcggccgcgttgccggtgagcacgaagcgggtctgcgcgggggagggcatggtctggcgggccacggtgttctcgtcctcgaactgcttgacgaacttgaaatgttcgacgaacggatggttctcgccggagattcttccggtcacggtggcggtgtcggccggggtcacctcgtcgtggaaggcgacgcggtgggctgcggcggcatggtccacgccgttgaagccccacatgaagtcgaaatgccaccagccgcggcggaattcgccgtcggtgatcacatgcaggccggcggccttctgcttggcgacgagttcggtgatggccttgtcctcgaccgccttgagcgctgcggcatcgattttgccggcggcgaaatcctcacgcgcggccttgagctcggccgggcgaagataggagccgaccacgtcggcgcggaacggcgcgttatgcgagtataccattgaatacccctttttttgggaaagcgacaaatacctagtgaaggttacacgcacgtcccgaaacacgggcgcacacggcttctcggccagtattcgtgcttgaatggatgatgttatccgttacacattcgagaatggaaggcaatgagcgaatcgcgcgatcccgcaggcgacagtacgaccacgaacaacatgggggaggtgcgggaagccgaacatcagggcgcggccgtcaaggcggcgttgggtgcgaacattggtgtcgccatcgcgaagctgctcgcggcgttcttcaccggatcgtccgccatgctttccgagtcggtgcattccatcgcggattgctccaacgaaatcgtattgatggtgggtggacgtttctccaagcgcaagacggacggcgaccatccgttcggcctgtatcgcgccaaatatcttgcttcgttcgtcgtggccacgctgctgttctttgtcggtggattcttctcgacgtccgaggccgtgaagaagcttgtcgcgatcagcgccgatccggcattgtgtgacgtgaacaggatggaactgcttgtcgcgttcatcgtggtcgtcatcagcgcatgcctggaaggattcggcctgcaccagagcatcaaggaagccaacgagcgtatggaacgcacgaacacgaagcatatgggcgtgttccgtttctggagacgcaccaagtccgccgaactggcttcggtgatcatggaggacacgctcgccctgatcggcctggcgttcgcaggcctcggcatcggtcttgctatcgcgctcgacgacgaggtgttcgacgcgttgggcggtcttatggtcggcctggtcctgatcgtcggctcgcttctactggcgttcaaatccggttcgctgctcatcggcgaggccgtggattccgatacgcgcgggaagatcgtcgaggcggttaccaccacgccgggcgtcgaacgattgctgaacatgcagaccgtgcacatgtcggaggacgacatcctcctgtgcgtcaaagtgcagaccagcaagctcgaccgcgactatgacgtggaaaccgtcgacaagatcgagaaggccgtgcgcaccgcactgccatggtacagtttcgagatctacgtcgaaccggacatctacagcgccaaacacgtgcacgcgtaaccggttcccgcgtaacaggaaccgttcaatatgggaaagcccggacgatctgattcgtccgggctttcccatatgcgtgtcggaaatggtggaagtgggattattcctcggccaccagatccaggtaggagtcgttccacaggtcctcgtcgccgtcgggcatgagcagcacgcgttccggattcaacgcctcgaccgcgccctcgtcgtgggtgaccagcacaatcgcgccctcgtatttggtgatggccttcagaatctcgtcgcgggacgccggatccagattgttggtcggttcatcaagcagtagcacgttcgcgcggctcgtcaccagcgtggccaacgccagacgggtcttctcgccgccggaaagcactcgtgccggtttcagcgcatcatcgccggagaacaggaacgacccaaggatggaacgtgcctgtgtgtcgtcaagttccggtgccacgtgaatcagattctgcaacacggtggcgtcaaggtccaatgtgtcgtgttcctgtgcgaaatagccgattttgcagccatgtccatattccacggatccggtgtcgggattctccagatgggcgagcagacgcagcgtggtggtcttgcccgcgccgttatagcccagaatcaccacacgtgaacctttgtcgatcgccagattcacgcctgcgaacacgatgttcgaaccatacgctttggagatgtccttcgccatgatcggcgtacgtccgcaaggtgccggctcggggaagcggatgtccgccaccttctccttcttctgtgcttcggacgtgttctccagcagtttctccgcgcggcgcatcatgttctgcgcggccacggccttggtggctttcgcgtgcaggcggatgccctgctgcatcagacgttcggccttcttctctgcgacttcacgttcgcggcggcgacgttcctcgtcgaccacgcgttggtgcaggtaggccttccagccgagcgagtacatgtcgatctggccgagctgtgcgtccagatgccacaccttgttcaccacttcgtcaagcagttcggtggagtgggagatgaccaggaaaccgccctcgtattttttcagatagccgcgcagccattcgatggaatccgcgtccaaatggttggtcggctcgtcaaggatcagcgtatccgcatcggagaacaggatgcgcgccagttcgatacggcggcgttgaccgccggaaagcgtacccaactgctggcccatcacgtcctgcggcaggccgagactggccgccatcgcggtcgcttcggactgtgcggcatagcctccggccttttcgaaatcctgcatggccttgtcgtagcggttcatcgccttggtcatgacatccggatccggatcggtcatgtccttttcggccttgcgtatgcgtttgatgatgctggcgatgtctcgcgcgctcatcatgcggtccagtgcggtctgctccgggtcggcggcatgcgtgtcctgtggcagatagccgagtttgccggagacacgtaccttgccggcggtcggcagcatatcgccggtgatcacacgggtcagcgtggtcttgccggcgccgttgcgtccgaccagaccgatcttgtctcccttggcaacgtggaagttggtgggatgcagcaacgtgcgcgcgccgatctgaatctcaagtccctgcgcctcaatcgccatgccgtgatacctctagtctttcgtgttccttcaaacgccaatcgaacatcatagcgaacacccgcaaccgtttcacctcatctcacgtttcatttccaagcagatgccggagcagtgattcgcggtggttgatgaagaccctggtgatttgatagctgtccgtatcctcataatcgcagggatggacgccgttttcgtcgaatgacaggatttccgcatccggcagaccgagcagaatcggcgaatgggttgcgatgatgaattgtgatccgtcgtttgccattcggtacatgtgctccagcagagttaattgccgctgtgtcgagagcgcggattcgggttcgtccataagatagagaccctttcccgtgtgggacaggagaatctccagaaaaccttcgccatgcgacatctcgtgcagacgggagtggaaaatcgaccgcaaagatcacagcgccctcgatcaccacaaatggatcgaaaaacagaccgataccgcttcgggcgccgcataccgacaaatgaacaagcgtcttgaacgagcacagcgcacactagattcactaaccgtagcggccaaacgctacgacggcgacatctggatcgacatacggccaagcaacagaaaggagctcctgcatctcacggaaggtattatcatattcggcagcggcaggatgaccagcttgaacgatgccgcgagaacgccaacacaatccatactgcatgccgacggacatcaatggaaggtcgcgcataatccagggatgagtggtgaaaaaccacggatgccaggcgtcgccataccaaaactcagcatcggacagcaagaccatatcggactgaccggtgccaacggactcggcaaaacaaccgtgatgaacgcattgctggacagcatgccggaagacttgccgcattgcagggtaaggaacgctcgcaggtgctggccgccttcgcccagctcaacgccgatccggataagctgctttctaacgaagcgccgtctccgggcgaactgcgcaagctcatgttgtgcttgggcattcttgaccggcctcagttgattgttatggacgagccggcgaactatcttgacttagagtccaaggtggctctggcaagatgtcttgccgactatccgggagcattggtggtggccagtcatgatgagtggttccttgaccaagcagtcagataagccaagcgatgcctatgccatcgaaagctggtttgcgttccgcgtgatcaggacgcgtaggcccgctttttatcaatgctgtactaaagccaatcgtcatcgtatggtttcgacatcatggcatggtgcacggtattccgttgaactttttaatatccctcgtcgatgaagatccatccgtgttccgcccgcgcggaaccgggattccacgcgtaccagcttccccagccatcttgggacgagttctgcgagccggcatggcaggagatgccattggacaggtagaccacattgtccatcccgtattcgtcaatggccgtggaaatcgaagaactgccaccggaagccgtgacgctgtgttcggctgcaagcagcgcggccgaacgctttgcgtcatatcggacggcatccacgcggcaaccgttccaggatttcagcctggcaaggtccgccttcaccgcgccgtcgatctgggattcgtcgaacttgcctgtcgcgttgatgctgatccgagcatgactgacatcggcaggccggagtggcaggtagacgaaccggtacgcgccgacagcgcatgccacggcggcgacgcataccgatgcgacggtgatgggtttcttgcttttcgtggtccgcatgatcctcccatataacagctttccctaaagcatacagcggaaacgtgataagaggaatggataccaagaccaacaagaacgcccttcaacggatactacgatggaacgcgtcaaacaggcggaatgattcccccgctccgcaaacgagatcggcaaacgactcatggtatttgaacatggacggtgacgttttgacgcgtataaagcgtataaagccgaatccgacgaatcagtactggaatgctgcaaggagggtcagatgatattgaccgatgccatcaatctcgttctcgccgaatatcctggaatgaaggcgattggtgccgcggagagtgccgatgcgtggatcatcggactcgatttcgcgtcttcaacagatgaccatccggtgccgggcacaccgagcgtagcggttgaaaaaacatcaggcgttctgcatgaccttattccggggacggaagatctctggcattacatgaccggtgccaaaaaggtgactattcctcggatttaaaatccgccttagtcttcccataagagctcccgcctttcacgccttccgcgtggaaggcgggagcttccgttattcgctgagcagtttcggcgtgaacgccatgaacaggattcccgcggtgacggcgaagacgatgtccgaaatcggttccgcgcggattagacgtcaagcaatccaacggaaaaagcaagaggaaaaagacacgaagaaacacgccgggccatctcataccagaggatgagtcaccccaacatttacgccaaggaatgaatacgacggacgatgccacggacacgaccagccgtactaccgttgaaccaacaacggaaacgaaacccacgcacacaccacgcgcatcccacatgcccagcaaaggaaaccggccatgtcatacgtcctctacttcagcaagccattcgcgctcgccatcgcaatctggccattcctctcactcctactcaccctgcccgtgctcgcactgctctaccaccgcgacaaccggctacgcttcacctccgcactgaccgcatatctcgtggtgctctacctcatcgcgctcgcatgcttcaccatgtacccaatgccagaaaacccggccacctactgcgccgcccaccatctcaggccacaactcaacccattcgaattcatccacgacatccgaaccgacggcatcacaggcgtcatgcaactggccatgaacgtcgtgttcttcctaccgctcggctacttcatgaaacgcgtcttccgctggaaattcgccacggcgttgccggccatgttcctcacctcgctgctcatcgaaaccacccagctgaccggcatctggggcatctatccatgcgcctaccgcctattcgacgtcgacgacctcatcaccaacaccctcggcggcatactcggctacgccatgggaagcattgtcacccacttcctaccccaacagcgcatcgacgaagacgccatcaccaccgagccaggcttcatgcgccgctgcgtggcgctcgcgatcgacctgttccttgtcgaaacggcgtcgctgtccgtcacggcgcttatctatctggttggcgtgctgttcgatgtgaaccgcgcgaacaacgtcaatgcggccgtctccgccgtggccaccatcgtcatgttcgtcctgttcgaaggaatcattccgtggaggcgcgccggccgcacgttgggcggcggtttcacgcgcatgacggtggagaccagggagcgttccggcatgcgcaggatcgtgttctatacgttacgcgcgttggtgttgtattgcgcggtctacggattgtggacggaccgtggcttctacgcgctgctgctcggcatcgcgcttatcgtgttctggcgcgttaaaaagcgcatgccgtacgactatgtctgaccgtcgtgcggagctgccgcgagtccggcgccgcaaaaacgcgacacgccgggcttgcgcgatggcggacgctcctgtatattttcaactcgttgcccaccaaggtggaaaacatgcggacatagcttagttggtaaagcgcaaccttgccaaggttgagaccgcgggtccgagtcccgttgtccgctccacaaaacgaaagctcccgggagggagctttttttgtatttccggcagtcgccggcaccggcgaatccaatggaatccgatgccggcggtcttgttttttcagtcgccgatgttgtcgcgtgccggcgtgaccatcgtcagcatcatgacggacggctcctcggcgtatatcgcgtgcgggatgcgggtgggaaagtaggccaggcctcccggaacaagctccacggtcctgccgttgcccgtcaccttaagccgtcccttcagcgtctgcacgaacaccggcatcgcggccgtatgctcgctgagctcctcgcccgtgtcgaaggagaacagcaccacgttgcctccggccttctgcatgacggtgcgggacacggtggacccctcctgaaaggaaatcatgtccccgaggtcctcgatgtatcccagttcgatcggttcggcctcattgcgttcgtcgctcatcatcgccctcctttggttggtggcagggatgcctccgtcgtatcgtcttcacgccggagacacggcatgtacgcgtggaggaaaaacgtttgaccacgatgtgaacacgctcttgcatcgaacgcgtttatggtccagacttttgcctgttccatgaaagtcggcaatgtcgccgggggcaagtgggacgaacggaggtattaaggaaatgaacgagaacatcgacatcgacaccactttcgtgccggacgattccgccagccattcctggacggagcgcgacagcgagcttgtggaggagtatgcggcccagctcatggcgatgagcatctgagcggacacaatccgaaaacgtgggggacgccccttccggaaactccggaaggggcgtccttccgttttttcattccgccgggccgaaacgcctccggcgcgtccgtagccacatgtgtgactatgctttccggccgtagcgtttgagatgaccgggaggagaccgcatgccgacggacggaaaaccgaaaaacggcatcgtcagacaattgttcagctatggcggcgtttcggccatgcaaaccttcgtggaattcggcgtgttcgccgtgcttcagctggccggcctgccgttccgtctggcgaatgccgtggccgtcttctgctccggctcattcaactacgtcatgaaccgcaacgtcacattcaaatcctcgtcgaactacgcgcgttcgatagccatgttcgtggccatgtactgctggaacctgctgttctccaacctgatgatggcctggatccccggactgctcggctggcccaccatggcggtcaagatcgtcaccatgggcatgcaggcggtctggggcttcctgctgtgccgctacgtcatcttcaaatgacgttcgcgccggacggttttcccgccgcgatcacgggaaaacggacatgctatcttacaatggatgcgcatcgggaaacttgtggctaagggaaggacgggacgccgttggcggatgtaagacgggaaatggaacggctccggcccgtgtatgagaccggggtgctgcgattgctgctgcgaggcaattccatgctgtacgtcgcgctgctgcgctccacgttcgacccgctcaccggcgagctgccacgcgagatcgtcgaggaacggttctcccgcagtctgacccgacttgcggaaacgggcgattacacgcccaaggaagggcagacgtccgcggaagccgcgcacacgatcctgcagcagctgacgaaggaaggcgaaggcgactacgcttggctcgccaattcgctcgacgtcgcctcgcaccgctacctgtaccgtctcacggcgcgcgcccaccgtgcgatcgaggcgctcgaccggctcgaggacaccacgaaagcgctgtccggcgcgcaggccaacagcatcatcatggagatcgagcatgcgcgcatgcagctgaccgccgacccccgcgaacgcatccgcctgctcgaacgcgacatcgaggagcggcaaaagcagatcgacgaattgaagcacagcgacacgttggacaagctcacctcccaacaggtgggcgacatcatcggcgtcatccacaacacgctgcgcggcgtgccgatcgacctgcgcgaactggcgctcgaggaacgcgacaacggcgacaatctgcgccgaagcatgcagtcgggctccatcagcgtggagcaggcgctcggcacctaccatgacgaataccacaggtcgttccacgaatccgacagcggccggcgtttcgaggacgcgttccaggtaatcgtcaccgacgagggacgccgcgaaatcgacgaggcggtgcgagacatcgcccagaacccgtatctcgagggcgagcccggcatcctgctcgcccaggtacgcgccgaactcaaacgcatctacgagggcatcgaggacgtgcgccggcagatccgcatatccgacgaggcggtgagccgtctggtgcgccagcagaccgacacgcattaccgcaccatgctcgacaagctccacagactgttcgtgcgggccagcgacgacgcgaagacgcaccccggctcggacgaacgcccataccgtacggacaccggcacggcgcaattccaggcattgccgtccaggcccgcgaaatcgatgacgcgcgcggccacggccggattggacgacgcgccttcgacgaacgtcgacgcgccggacctgaaggccatggtcgagatgtgcggcccgcggctgacgcacatgatcggactcatcaggcgcgatccggtcaaaacggcggacggcaggttcgtggatttcgcggcgagcttcaaccggctgccccgggaggaacggcgcgaaagcgagctgatcggcttcctaagcgccctacgcacgcaggacggaccggcaaccgtggcatggcattgcgtatccatcgacggaggcgagcgcgtgtggcgcaccaggccgatcctcaccaccgaggcggcgcttgacgagatcatcgaggagggatgagcatgacggacaacaccgacggattcgacactggcatcggcatcgaagaggagacaggcccggaatccggcatgccgtccgaagggccggatatgacgagggacagaccggcattgttcgacggggatacgggagacatgcctcttgaggcgcgtatggccgcgatcgcgctgaaacgcgaacgctacatcgacggcagcctgtacgacagggcgtgccagtaccgtgaggccgtggaacggtcgttgaacaacgacatgctcagactggtcgacaacacgaaataccggatcatgtacgcgtcgccggtcacggacgcggagacgaacatccgctcgttgaagacgcgtgtgagcctcacccgcgaggaggccgccacgctcgcggccctgcgcatcaaggtgctggagtacgagaaccagaagacgaagccgggcgactggctcatcagcttcgacgacatccgcgcgctgctcgccacgggagcgggcttcctcacggccagcaacgacgaggagggcacggcgaagaagatcacgtccgtcatctcgcgcatgcgcacctacgggtatctcgcggaaacgggggacgagaacatgtacgtgctcacgccattggtgccgatggtgctcgaccagaagctcgccgaccggtggctcggctccgatgatacggacggcgatggtatgaaagacgcggatggcgatggttatgacgattcgtccatcggcgcggatggtggcgatacttccgattcgaccgggacggtttcgtccggcgtcgagcaggacgcgttcgatttcgattcggccgatgacgcttttgatggaggggaacactgatggaagacggcatgaaaatcgtttccgacagttggatgctgcaaagccggcagatcgtcaactggggctcctacggcggctaccacgtgttccgcccgtccatggacgatgcgatgccggtgaccctgctcgccggcgcgagcgaatcgggcaaatccacgctcgtcgacgcgcagatctcgctgctctacccatccggcaccccctacaataaggcgtcgaattcgggacgttcggaacgcaacgactacacgtacctgcgcggcatgatcggcatcagcgacggcgaaaacggtgagaccccgatcttcctgcgcggcagggacgcggacggcaccccgcagaacatctggggcgcgatcgtcgacacatacgcgaaccgcagcgacggcggactgttgtcctgcgcaaaattcctctacctgaccgcaggcgacgggccggacggactgcgccgccaatacgtcacctggaaccagaccatcgacccgcgcctcatggaccggcaccgcgacacgtcattcacgcgaggactgatggaacagacctacccaggatgcacgacgcacgtcaacgcgcaggcgttccacgcctccatctggcaggacatgggcctaagcgccgaagcatgcaggctcctgcacaagatccaatccgccgacgcgccctccaaactcgacgacatcttcaaacagggcgtgctcgacgtgcccgaatccatccggctcgcccgcgaaaccgtcgacgactacaaccggttcagcgagaacttccacagcatggaagacaaaatggaacgcgtcgccatcctgcaggacatacaagcccgctacggcgaatacgccaaacaagccagcgaacgccgcgaatacacgcccatcgaccccgaccgcgagcaaggcgagacgacgctcgccgcatggacatggtcgcgcatggccagcgaagtacgcgccggactgccatcggcgcaacgcaaagccaaggaatcccaggacgccatcgaccggtctcagcagcgcatcgacgaactcgacacgcaaatcgaagccgtcaaagaacgcatgaacggcatcgacggcggcagcctgcagcaactcggcaaggacttcgaacgcgcacgccaggacgccgacgaggcgtgcagacaacggcacgccatcgccgaacggttcgaacgcgtcgaaggcagactccccgccgacgagcagacatggaacgccaaacgcgccgcgctcgccttgtcgctcgacacgtacgacaagcgtttggaagacgcgcgatccgaataccagcggatggtggtggaacgtcacgcccggcagggcgaacgcgacctgttgaggcaggattaccggcgcaagatcgaacacaggacgcgcatcagcgacgacatggaccatgcgcgcacgctcatcgcacgggcgacgggcttggacgagacggaactgccgtacgtggccgaactgatggacgtggacgagggggacgagcaatggcgtctggcgatggacgtcacgtacgcgcccatcgcgcagaccattctcgtggacaagcggcatgagcaggggttcgccgcgaaggtcagcgcgatcgatccgacgcgtatgacgcggcgtgcctggcgtttcgtcgataccgacgcgcaatacgattcggcctgcaacgaggggtggatgtcgtcgaagctgcggtacaaggaggattcgccgttcgtcggatggtcgaaggagcagaccgcgtcgcaacggttcgacgcgcgttgcgtggaggcgatcgacgacatggaccgggccgaacggcaggtgcaggtcgacgggcaaatcaaatccggcgaccgtggattccatggcgtcaaaggcctgcgtcaggtcatcggcttcgtgaacgaacggtatctggccgaattggaacgccagcttgacggggcggaacgggcgttggaggacgccgaccgccgcggcaggcagatggccaacgccatgactctgctgcaggacgagcatgagctcgcattgaccgtcgcggatctgccatggggcaagatcgacgtggacgggctcgagacgaaggcggaacggatccgtctgcagatcgaacggatcgaaagcgatccggaactggcacaattgcaggacgagttgaaacagctgctacggcagaaggacgacgagggcaagaccaggtaccgtgccgaagcggaattggaaaacgcgcagcatgccgtccaggccgaacaggcatggctcgacatgcatggcgactccgatttcgacgatgccgcattgtccgacatggtgtcgaatctgctggccgacacgtatgagacctgtttcgacacgtcgcgtccgcaggaacggccgcagcgcatcgccggcggtttcgaccgtgaggggacggcgccgttcgacgtgcgcgtgctgcgcagaatcggcaacaccgtgcgtgcgagactccagcagatcgacgagcgtgccgtccaattgcgcgccgacacggaacgcgccatgggcgactatctgaagcaccattccacggagggcgacaccgtcatggcgagcgtggaggactatccgtatttccttgacgagctcaagaacctcaacatgctcgtcacccgcgccgcgaccgacgaggagtatgcgaacagcgtcgaaaagctgtatatgagcttccaacagctcaaccgcgcgttcaacaccgacgaggagaacgtcagggagcagctcgaccgcatcaacggcatgctcaaaggccaacagttcggcccccgcggcggcaggctctcgctccacgtggacttccacccgatcgaccggcagttcaaatcctcgttgggccgcatcatgtcgaagctcgacgattggacacgcaacgcgcgcagcaatcccatggagacgcgcaaggcgttcgcaggctgcgaaacgttcatcggcaggctccaggcggaactcggccagatccgcgacacgaacggcatcaaggaatacggtgcgcgcaacctcgatccgcgcgtgcgcagctcgttctacgcgatcgtgcaccataacgatctgcccgacgagcgcatcagctccaccggcggcaagtccggcggcgcgttgcaggaactcacctcgttcgtctacggcgcggccctgatctacctgctcggcggcgacctgaccggcaagcccacctacaccacgctgttcctggacgaagccctcatcaaagccgacggacgctacacgaaacgcgcgctgaccgtgctgccgcgcctcggcttccagatcatcgtatccgcgccggaaagcaaaaccgccgaaatcctcagcatcgcagacaaggcgtacgtggcatacaaggatcccgcaaccggcaactcgtacctgcaggagctcgaccgcgagccggcaacgcaagccgaaacacaagacgccaccgtcgaacagacgcaacccgcgacggaggcataatatggcagcggccagaaacaccacaggcgaaacggacatccgccggaaactcgacgaatacgtcgacgcccacctcaccaggcacatgtacgacaccgacgaatcctggccgctgcgcaaaaccatccgactgcccaaacaagccgaactagagcagcactacaaccaaatccgcgcccaaaacgaaaccatccgcgactgggcgcggcaacaccactgcgaaaccagcgaaaaaaccaaaatcgtctccagcggactcatccaacaaaaaagcccgctcatcgactccgtgaccatacccgacctcgacaccgccctccgcatcgccaccaaacaaacccgcgaacgctacctacgcgaacacgaccgcatgagcgcgctcgccaaagaattcggcctcgaaccggagaacgccatgaacgtcgccaaaaccctcaaagaccacgacgacaccgacttccacctcgtcatccaagccgcccactacttcgcaaaccacgactgccacaccatgaccccacgcatggcgcccatcccaggattcagcgccaaatggctcggcgcacccaactcccaacgccgcaaagcgatatgccagctcaccggacaagacaacctcaccttccaggaacgcccgaacgaactccgactacgcctcatggacgccgaacaccacgaccaacccgacctcatcgtcacccaaccatgggtccgcagccagccaaccgacatcgaacacgccatcatcatcgaaaacaaagacacctaccaggccatgcccaccgtcgaacacgccatctgcatcctcggcaacggatacgccgcaacatcacacatcacaacactcctgccatggctcaccaccatccccaacatcatctactggggcgacatggacgccaacggactcgacatcctctccaaactacgcgccaccggcatcccatgcacatccatactgatggacaccaccgcataccggacatacgaacaatacggcacccaactcgacgccaaaaacaaacccctcaccacacaaaccccacaacccacacccggactcaccaccgaagaacgcaaactctacgaaacactctgcacaggaacagacatccaatacctacgcatcgaacaggaacgcatccccatacgcgacgccacaaccatcctgcacgaccaacaccactggccaatcgacatacccggcaacgacataccaaacaacaacaccaaatagaacacctgttcgaaaccacaacaaaaatacgctatcctatacaacagaacaggcaacaccaagcggaagaacaccatgacaaccaaacgcaacaacacgacacacaacgaagtcgtggtcgaacacgtactcaccagcgacgcattcctcacacgcgaaatcaaaaaagcccccatgaaaacaacaggcgactcactcataacagacctcacccacctacccaacgacctcaaaatcaccatccaaggcgctcgcgagcacaatctcaagaacgtggacttggagtttcctcgcaaccgcatggtggtgttcaccggcctgtcgggttcgggcaaatcctcgttggcgttcgatacgctgttcgccgagggccagcgcaggtatgtcgaatcgctgtcggcgtacgcgcgccagtttctggggcagatggacaagccggacgtcgacttcatcgaggggctgagccccgcggtttcgatcgaccagaagaccacgaaccgcaatccgcgttcgacggtcggcacaatcaccgagatctatgattatctgcgactgctgttcgcccgcaccggcattccgcattgtccggaatgcggcgccctggtaagcgcgcaaacaccgcagcagatggtggacacgttgctgaagtatccggaacgcacgcgtttccagattctcgcgccggtcgtgcgcggccgcaagggcgaattcgaggatctgctcgaactgctgcgtggcgatggttacgcacgtgcgctgatcgacggtgagatgcggcaattgtccgatgacatcaagctcgccaagcagaagaagcacaccatcgaagtggtggtggatcgtctggtggtcaaggacggtatccgccagcgtctgaccgattccatcgaaacggcgttgaagctttccaaaggcgtggtcgtcgccgatttcgtcgatttggacgagaaggatccggaccgtcgcaagccgttctccgagaaacgcgcctgcccgaacggccatcagctggaactcgacgagatcgaaccgcgcaccttctccttcaacgcgccgtatggcgcctgccctgaatgcacgggtatcggatacaagctggaaatcgaccccgaactggtcattcccgatccggacaagacgctgaacgagaacgccatcgaaccgtggggcatgaccaaaggcaccggcgaatactaccgccatgtgcttgagggactcggcgatgagatgggcttcgacctggacacgccttggaaggatctgcccaaggacgcgcgcgacgccatcatgtatggccgcgatttcaaggtgcaggtctcgtaccgcaaccgttggggtcgcatgcgcgagtattccaccggtttcgaaggcgtggtgcgcacgttgatgcgccggcatgacgaaaccgattccgaccagatgaagcagtattacgagtcgtacatgcgcgaggtgccatgccaggcgtgccatgggcggcgtctgcgtccggaagtgcttgccgtcaccgtggacgacgagtccatcgcggacgtgtgcgacatgtccgccgaacggagcctcgcatggatcaacggcctagaactcgaaggctcggccgcgcagatagccggcgaagtcgtcaaggagatccgcgcacgcctcggcttcctcaacgatgtcggcctgaactatctgacgttgtcgcgtgcggcgaagaccctgtcgggcggcgaggcgcagcgcatccgactggccacccagatcggctccggcctggtgggcgtcatgtatgtgctggacgaaccatccatcggcctgcatcagcgtgacaacgaacggctgatcggcacattgcatcatttgcgcgacctcggcaacacgctgatcgtcgtcgaacatgacgaggacaccatcagaaacgcggactgggtcatcgacatcggtccgggcgccggcgaacatggcggcgaggtcgtgtattccggccccgccagaaaaatcaccgaagcgccacgctccatcaccggcgactacatcgccggccgacggaagatcgaagtgcccgccgcacgccgcaagacgcataagaccaagcagctgcgcgtggtcggagcccgcgagaacaacctcaagaacctgaacgtcaatttcccgctgggcgtgttcacctgcgtgacgggcgtgtccggttccggcaaatccacgctggtcaaccagatcctttatccggtgcttgcggacaagctgaacggcgcgcgcatcgtgcccggcaagcacacgcgcgtggaaggcgtggaccagtgcgacaaggtgatccacgtcgaccagaatccgatcggccgcactccgcgttccaatcccgccacctatacgggagtatgggacaaaatccgcacgctgttcgccaagacgcccgaagcgcaggtgcgcggctatggtcccggacggttctcgttcaacgtcaagggaggccgctgcgaggcatgccacggcgacggcacgttgaaaatcgaaatgaacttcctgccggacgtgtacgtggactgcgaggaatgccacggccagcgctacaaccgcgagactctcgaagtgaagtacaacggcaaatcggtcgccgacgtgctgaacatgcccatcgaggaggccgcgcagttcttcaaggcgtacccgtccatctcgcgttacctggacaccctggtgcaggtcggtctcggctatatccggctcggccagccggcgccgacgctgtccggcggcgaatcgcagcgcgtgaaactcgcgacggaactccaacggcgttccaccggcaaaaccgtgtacatcctcgacgagccgaccaccggcctgcatttcgaggacgtacgcaaactgctgctcgtattgcagggattggtggacaagggcaacaccgtcatcgtcatcgagcacaatctcgacgtggtcaaatccgcggattggatcatcgatctggggccggaaggcggtgacggcggcggcaccatcgtcaccgaaggcacgccggagcaggtcgcgcaatgcgaacagtcgtggacgggcaagttccttagggatatgctgtgactgatttcgaacgacacagtccggacgtgtggcgcaaaacggcggatgcgttacgggaaaccgcagtatcggacgccggcacccaatccgacggcaggggagtgaacaagaacggcgcgcccctgttgggggatactcgcgacctgttccgtccgaaaacctccgacattcccgcgcagccgggcgtatacaagtggcgtgacggcgaggggcgcgtcatctacgttggcaaggccaagaacctgcgcaaccggctgacgaactacttccagccgctctaccagctgcatccacgcacccagaccatggtgttgacggctcgcagcctcgaatggacggtagtgggtacggaactggagtcgctcacactcgaatacacgtggatcaaggagttcgacccacgattcaacgtggtgttccgcgatgacaagacctacccgtatctggccatctcatcaggcgaacgcatcccacgcgtatgggtgactcgcagccgcaaacgtcgcgataccagatatttcggcccgtacgccaaggtatgggatcttcggcacagcctcgacgcgttgctgaagacgtttcccgtgcgcacatgctcgaagaacgtgttccacaaggcgcagttgacgggccgtccatgcctgttggcatcgatcggcaaatgctccgctccatgcgtgaaccgtatcggcgctgacgagcatcgcaggatgtgcgagcagcttgtcggcgtgatgaccggccgaatcggcaaatcgtatatcgcccaactgacccgcgacatgaagcaggcgagcgccgaactggaattcgagaaggcggcccggctgcgcgatcagatccaaatgctcgggaccgtggtccagcagaacgccgtcgtgttcgattcggatgtcgacgccgacgtgttcggcatcgcgtccgacgagcttgaagccagcgtgcacgcgttcttcgtgcggtccggatcaattcgcggcgaacgtaactggagtgtggagcgagtcgaagatgtgagcgacgcggagttgatcgccgatctgatcactcaggtatattcggaaaccacgggggagagcgcggccgtctccgattcgaccgtcgtgaccgagcagcgcaatgcgatcggttcgacacagaccgtgaccgcaacggatgctatcgcccgtgcgcaggccacgaaggaacgcaacgaacgtcaggagcagacgggacgtgccgacctgctggctccaatcgcgcctgttccccgtgaggtgatcgttccaatcgaaccgtcgcgcagcgcagggcttgagcaatggctaagcggattgcgtggagcggccgtcaccatccgtgtagccagcagaggcgacaagaaacagcttatggaccgtgccaacgacaatgccaagcaggcgttggcacgcagcaagatgagccgtatcagcgatatgggcgcacgttccgatgcgatgaacgatgtgacgaaggctcttgggcttgaacaggcgccgttgcgcattgaatgctacgacatttccaacacagtcggcggcgcattccaggtagcgtccatggtggtgttcgaagacgcgatcgcgaaaaagtcggagtaccgccgtttcgccatccgaggtgcggacgggcagggcgcgttggatgatttgagcgcattgtatgagacgttgacccgtcgtttccgccatggcaacatcgccggcgattccggggaaagcatggacaacgagcgtcggatggccacgcaaaatgataggtcggatggcacgaatggtcctgaaacggatgccgtgcagcagaacaccaaccgtcgccatttcgcctataagccgaatctggtcgtggtcgatggcggcaaaccgcaggtgatggcggcggccaaggcgcttgccgactgcggcgtggacgatgtggccgtctgcggattggcgaagcgtcttgaggaggtttgggtgccggatgacgactatccgatcatcctcaaacgtcagtccgaaggcatgtatctgctgcagcgggtgcgtgacgaatcgcatcgtttcgccatcacctaccatcgtcagaccagacgcaaaggagctttgcgttccgctttggacgacattcccggcatcggcgaagcctatcagaaacggcttctcaaccatttcggctccgtacgcgccatgcgtgaggcgagcgtggaggatttcgaacaggtcaaaggcatcggccatgccaaggccgagaacatttaccaggcattgcattcgtccgttgacattgcttcgaaggcggaggatgccctccgaacagtgaaatcggatggaaacagtccgaaagatgaaaagaaatagaatctgtaacgagcaatcgcttctgcgttgctagcatgatgaatggtgagagtaagggagggaacatgaccgaggtggaccatcggtgcgcggtccttggcaaacccatcgcgcattcgctttcccctgtattgcataatgcggcctatcgagctctaggacttgacagctggtcgtatggcaggcacgaggtcggcgagacggagcttgaggattttttggagtcgcttgattccatctgggcgggactgagcctgaccatgccgttgaagaagaccatccagccatatggcgtgccatgcaacgcgtgggcgaaagagctgaaggtggccaacaccgccgtcttcgactggtctggcgcgaacgataagaacgccgccatccctgcgatcaggctctacaacacggatgtgaagggaattgagctcgccttcgagcactcgtatcgggcacgtggcatgcggatggattctggacaagacggcgaggcggtgatcatcggcaatggcaacaccgccacctcggctttggcggcctgcaccgagatgccccacattggacatgtcaccgtcgtggcacgccatcccgataagaacgaggcgcttgaaccattggcggaaagccatatgggcgtcggctccataagcatcgtcgccatggaccatgcggtgaatctgctgtcccatgcggacgtcgtcatcaacaccatccccggccttgccgccgatccgatcgccgaggcgtttgcctcagccggcatagtcacgaacggcacgctactcgacgtggtctatgatccccgcccgaccaagctcatgcaggcctggaggtcatgcggcggcaccgccatcggcggcgaggagatgctgctgtaccaagccatgattcaagtctggctgatgaccggcatatgggacaacgatccgccgaccgagcccaccagccatcagaaagtcgaagcattggagcatgccatgcgctccgcgcttaaggaggccctgtgatgaacgaaaagaacaacgccgtcaaccaggcaggcaggcatacgagcgcgccttctccggccgcaggcttcgaagtgctgctcatcaccggcatgagcggcgcgggccggtcccacgcggccaacagcatcgaggacatgggctggtatgtggtcgacaacatgccgccgaaactgcttgtcccgctggtggacatgatgaccagctccggttcgaacatccacaaactcgccgcggtcatcgacgtgaggtcacgtgactatttcgacgacctgtccgccgtgctgagccatctggacgatcttggggtgaagacccgcatcctgttcctcgacgccagcaacgaggtgctcatcaagcgctacgaatccgtgcgcaggccccatccgctgcagcagggcaatcgtctgatcgacggcatccttgaggaacgcgacctgctgaagaacctcaaagagcacgccgacatcgtcatcgacacctcgacattgagcatccatcagctgtccacgaaactgtacgagggtctgcttggttccggaccgaccacggtttccgtgcatatcttcagtttcggattcaaatacggcattccgatagacgccgatttcgtggcggacgtccggttccttcccaacccgttctgggtgccggagcttcgttcgctgacgggcaaggacaaaccggtcagcgactacgtgctctccagcgagggcgcggaggagttccttgacgcctacgagaaagccatcgccatcgccatcgaaggttatgcgcaggaagacaagcactatgtgaccatcgcgttcggatgcaccggcggccagcaccgttccgtggccatgagcgaggccttggccaagcgcctgcgtgcgcgtggtctcacggtctccgtatcggcccgcgagctggacaagcgttcggccgattgatgaccgcattgtgagaagacagtatccaaatacaaagaaaagctgccggctttgtccaagttattcggtatcacagtaagccggtagcagtgcgggtcgagtccgcgactcgcctgaaattatagggaagaacaggaaagtaggaggttggctcttggctcttctggatgacgtcaaaagcgagctggccgcaatcgacaacgagttgcccatcgccaaaaaggcacaggcgactgcgatgattcgattcggcaatggtttgcactcggtggatcaccacattctcgtgcaggcgcagcttgattcccaagacgcggccatatggctgcaggacaccatcagaaatctgtacggccacgaagccacgcttacccccgtttccaggcagacgccgaccggcgtggtgcagcgcttcatagtccgcgtccccaagggcagcgcggctctggtgctgcagaccggcctgtacagccgttacaccaaaaacatggtgctgggtctgccgggcgacatcatcaacggcaagatcgcccagatcaaggccgcctggcgtggcgcgttcctcgcaggcggacacctgtccgacccgggcaaggccagctatctcgaaatcgtatgtccgaatcatgaggccgcgctggcgctggtctccaccgcgcgtcgtctcggcatcaccgccaagccgcgtaagctgcgcagctccgaacgtgtgacgttgcgcgaccccgatgccatcgaacgcatgctcatcctcatgggcgcccctcattccgcccgcgaatggaccggaaagcgttccgacggagaggcccgaggcaaggcgaaccgtctggcgaacttcgatgacgccaacatgcgccgtagcgccaaggccgccgcggaagcctgcgataaggtccgccaggcctttgaaatcctcggcgacgacgttccggacaatcttaaatccgccggccagctccgactcgaccatgccgacgcgtcccttgagcagctgggccgtctcgccgacccgccaatcaccaaggacgcgatcgccggacgtatccgtcgactgctgcaattggctgagaaaacggagaaggcacgccgtcaagcggcctgattttcgtttccggaaacaaaacaccatgcgacttttccgtcgtatggtgttttttgttcgtttgggcttgtattatgcgtaagtggcaatatggccattccacgcttacaagcggctaggaaaggatatacatgaagacactcaaggatcttggagatctcaagggcaagcgcgttctggttcgcgccgatttcaacgttccgctggacggcaccacgatcaccgatgatggtcgtatcaaggccgccctgccgaccatcaaggctctgcgcgaacagggtgcgaaggtcattctgatggctcatctcggccgtccgaagggcaaggtcgttccggaactgtccctggctccggtcgccgcccgtctcggcgagctgctcggcatcaccgttccgctggctgccgacacctatggtgaggacgcccaggccaaggtcgccgctatgaacgatggcgacgtcgtgctgctgcagaacgtgcgtttcaacccggaggagaccagcaaggatccggaggagcgtgccgcatacgccaagaagatcgccgctctcggtgaggtcttcgtctccgacggcttcggtgtcgtgcaccgcgcccagggctccaactatgatgtcgccgccgatctgccggccgccgctggcctgctggtcgagaaggaagtcaaggcactgtcccgcgccaccgtgaacccggagcgtccgctgaccgtcgtgctcggcggctccaaggtctccgacaaactcggcgtgatcgacaacctgctggacaaggccaaccgtctggtcatcggcggtggcatggcgtacaccttcctcaaggccaagggctacgaggtcggcacctccctgctggaagaggaccagatcgaaaccgtcaagggctacatggagcgcgccgagaagaacggcgtcgaactcgtgctgccgaccgatgtcgtcatcaacccggtcttcccgaaatccgatgaggacatcgctccggaagtcgtggccgccgatgccattccggccgacaagatgggtctggacatcggtccggaatcccagaagctcttccacgataagatcgtcgattccaagaccgtcgtgtggaacggcccgatgggcgtgttcgaggtcccgaccttcgctgaaggcaccaaggccgtggcccaggctctcgtcgatgccactgctgccggcgcattcaccatcgtcggtggtggcgattccgcttccgcagtgcgcaacctcggcttcccggaggatggcttctcgcacatctccaccggtggcggcgcctccctcgagttcctcgagggcaaggaactgccgggcctgaaggtgctcgactgatctcagaatcatgaaggggtgcttcctcatcagtgggtgggggagcaccttttgcgtatttcgcatacaatgtcacaagaacgacctttcgctttgacgagcacggacgggagacgacgaatattatggggccgaaacggattcctttggtggccggaaactggaagatgaatttcgatcatcttgaagcgacgtatttcgtacagcagcttgcatggaatcttcgggccgtccatttcgactacaaacgttgcgaaatcgcattgatgccgtcattcacctcactccgcagcgtgcaggtcgccgtcgaatcggacaatctgaaaatccgctacggggcccaagccgtctcagtcacctcgcagggagcgttcaccggcgacgtctccgccgatatgatcgcccatctcggctgctcgtacgtgatcgtcggccattcggaacgacgcaaataccatcccgaagacgacgcgaacatcgtcgaccaggtgagggccgtgcttgctgccggcatgcagccgatactttgcgtcggagaaagctacgaggaacggcgcaaaggcatagagctcgatttcgcggtcggccaggtgcacgacgtgacgcgggacctgtccgatgaggaggccgcgaagctgattgtggcgtacgagccggtatgggcgatcggcaccggcatggtggctacgcctcagtcggcacaggacgcggccagggcgatccgaaacgacctgtccgatacgttcggaacacgggtcggcgaaacggtgcgaatcctgtacggcggttcggtgtcctcgaaaaacgcggtggaactgatcaacgagccggatgtggacggcttcctgatcggcggctccgcgttgaaggtcgatgaactcacacgcatctgcaagctgacattggaaacaaccgcctgaaaacttttaaaaagcatggttggacgctcgattttttcaacaccatgcgctactatcagaaacagtgtttacgaactggaggttcacccgtgtccgctatggctactgtcaagcttgtgctgcagattcttcttgtcatcctcagcctcttgctcaccttgcttatccttatgcacaagggtaaaggcggcggcttgtccgacatgttcggcggcggactcacccagaacgcgggttcctccggtgtcgcggaaaagaacctgaaccgttggaccgtcatcatcgccctgctgtgggtggccatcatcatcgccctcggtctgatgacgaaattcaacctcatctgattgacgtaatttggtttggcccatgaccggcttcacggtcatgggccaaacttgtctccggctagattgctcccgcaaaggattcaaatgacttcgacaaacaacacctatgatgacgtgaccatggtcgtcgccgatctggacggcacactgctgcacgacggaaagactttcgaggaccgtttcctgacgcaacgatccattgacagcatcaaccgcatgcacgacgccggcatcaaattcgtggtggagaccgcgcgaccggtcagcaccggctactcgttcgtgcagaagcttccggttgacgccgtcgcctatctcaacggggcgctgttggatttcaaccccgtctcgtccgattacgatatgctcacctcaccgacactgccgaaggacggacatctgcagaagatcggattctcttcgaaaagggcctgcgaggtctgcaagtacctgctggaggaactgcctggcatggaagtgggcatcgtcatggatgatgtcaggtacacgaatttcgacgtcacgaaatactggaagacgcagacctggcgatacacggatttcgatgacgttccggacggcaccgcggacaagctgatcctgttcccgaacgaggagcagtggaagcgtgtgggacggctcatccccgacgatttcgacgtgcatatctccgaaggctcgctgtggatgctgatgaatccgcaggccaataaggagcatgcattgagcatcctcgccgatcgcatgttgacgccgttgtcacggaccgtctcattcggcgacgatttggtggacatcgccatgcttcgtgaatccggcaggggagtggccgtggccaacgcgaaccccgacgtgttgaaaatcgccgatgagatctgcccttcgaacaatgatgacggcgtggcccaatgggttgagaacaatctgctttgaccgacccccccccacatggagtcttttcacggaattgaactcattcatgcagcggcatgaaacacatccaccaaaattgaactctttgtctttcttggtgtactgtcgtgctattctttgaactagcttttgtttaaattgaactggaaggataggcatgacggaatcattctcgaccagattgaatgatgccatggcattacgcgagcttaaacagattgatttcgttcatgctgcggaaaagttcaatatcaagctcggcaaaagccatatgagccaatacgtcagtggcaaaaccgttccccgtgccgatatcgcgcatttccttgccgcgtatctgcgggtcaacgaggattggctgatgggcaaggatgttcccatggaagagcatgccgcgattttgccggattttgccggtgaacagcccgaccatgttgacgatgcatccgagcaaccgacagaaggaagaaccatgcgcacttttacgaaatcccacaagctcgacaacgtgctgtacgacgtccgtggaccggtcgccgacgaggccgcgcgcatggaggccgccggcacgcacatcctgaaactcaatatcggcaatccggcaccgttcggcttccgcacgccggatgaagtggtctacgacatgtcgcagcagctgcccgacacggaaggctattcgccgtcgaagggcctgttctccgcgcgcaaagccatcatgcagtatgcgcagctgaagaacatccccaacgtgtccatcgacgacatctacaccggcaacggcgtcagcgaacttatcaacctgtccttatccgcgttgctggacaacggcgacgaggtactcgtgccgtcgccggattatccgctgtggacagcttgcgtgaatctggccggcggaaccgcggtgcattacgtctgcgatgaggattccgaatggtatccggacatcgacgacatgcgttccaagattaccgacaagaccaaggcgatcgtcatcatcaatccgaacaatccgaccggcgcgctgtatccgaaggaagtgcttcagcagattgtcgatcttgcgcgagagcaccagctcatgatcttctcggatgagatctacgaccgtctggtcatggatgggttggagcacatctccatcgcgtcccttgcgcctgacctgttctgcgtgacgttctctggattgtcgaagtcccatatgatcgccggctggcgtgtcggctggatggtgctgagcggcaacaagcgtctcgccaaggattacatcgagggtctgaacatgctggccaacatgcgtatgtgctcgaacgtgcctgcgcagtcggtggtgcagaccgcattgggcggccatcaaagcgtcaaggattatctggtgcccggcggccgcatctacgatcagcgcgagttggtgtacaacatgctcaacgatattccaggcatcaccgcggtcaaaccgaaagcggcgttctacatcttcccgaagatcgatgtgaagaagttcaacatccattccgatgagcagttcgcgcttgacctgctgcatgacaagcatatcctcatcagccacggcggtgcgttcaactggcaggaaccggaccacttccgtgtggtctatctgcctcgcatcagcatgttgaaggagaccatcggcgaaatcggcgacttcttcagcacgtattggcaggcttgattttcggttcgcttttctttcgattatggccgcgatctgatatcgcggcctttttgtctttccgtacgtcttctgcgcgtattatttcggcatacgaaaaagaggtctccatcaaaagatggagacctctcggcttttatccgtttaacggtgctgtatcagcgaatgattcagccgttgacgcggtcgatgccagcctggacgtcggcgaggacggtgtcccaggacttgatgaaggctgctacgccgtcagcttccagcttgtcggtgacatccttgatgttgatgcccagatcggcgagcttgttcatgatggcgtgggactcttcgtaggtgcccttgatggacggagcgccattgccgtgatcggcgagagcgttcagggtcttctccggcatggtgttgacgacgaacggagcaacgagctcgtcgacgtacttgcagtcggagtaggcggcgttcttggtgccggtggaggcccacagcggacgctgcttcttggcgcccttggcttcaagagcagcccaacgcggatcgttggcgaacttgttctcgaacagctcgtaagccaggcgagcgttggccacagcggccttgccctcgagagccttggcttcgtcggagccgttggcttccagcagcttgtccacagcggtgtccacgcgggagacgaagaaggaagcgacggagccgatgtgcttcaggtcgtggccgttggcgtcagcctgggcgatgccctcgatgtaggcgtcgatgacctgctcgtaacgctccagggagaagatcagggtgacgttcacggagatgcccttggccagggtggcggtgattgccggcaggccttcgagggtggccggaatcttgatcatggcgttcggacggttcaccttggcccagagttcctcggcctgcttctcggtggcctcggtctcgtgagccagacgcggatccacttcgatggagacgcggccgtcaacgaaatcggacttctcggcaacctcacggaagatgtcggtggcgttgcgcacgtcggtggtggtgagctcgcgcacggcggtctcaacgtcgaccttgcccagttccttcagctgcggatcgtacgggccgacctcgtgcagagccttctggaagatggacgggttggtggtcacgccgacaacgttcttgttggcgatgagatcctgcagagagccggactcgatgcgggagcgggacaggtcgtccagccagatcgagacaccggagtcagaggtgcgctgagttgcttcagtcattgttttttctccttgatacctttttggatcaaatcttgtttatcggtgaaaggggaggggcacatgctgtcgtgtccctccccgtatcatcacttggcggcttcgacttccgcgatggaggccttggcggcttccacaacgtgctcggcggtgatgcccagatcgatcatgttctgagcgccatcaccctgcaggccgaactgctcgatggacaccggcttgccgtaggagccgaggtacttgtaccacggcatggcaacgccggcctcgacggagacgcgggccttgacggcggccggaagcacggcctccttgtattcggcgtcctgctcctcgaaccattccacgcacggcacggacacgacgcgggccttgatgccctcgccggccagggtcttggcagcggacacagcccactggacttcggaaccggtggccatgatgatgacgtccggggtgccctcggtgtcaacgagcacgtaagcgcccttcttcacgccgtccttggccttctcagcggtctcggcgagaaccgggacgccctgacgggtcagaaccatagcggtcggcagggtgttcttcttctcgaagaagtaacggtaggcttcagcggtctcgtaagcgtcggccggacgagcgacctcgagctgcgggatggcgcggaaggaagccagatgctccaccggctggtgggtcgggccatcttcgccgactgcgacggagtcgtgggaccacacgtacaggttcggaatctgcatgagagcggccagacgcacggcggaacgctcgtaatcggagaacatgaagaaggtgccgccgtacggacgggtgtgggagcccagcaggatgccgttggtgatggtgcccatggtgaactcgcgcacgccgaagtggagctgacggccgtacttgctgcagttcggccactgcttggtggcgcactcagccggggcgaaggtctcagcgcccttgaggtcggtcttgttggagccgccgaggtcggcggagccgccccagagttccggcatgacggctgcgatggcgttcagagtggagccggaagcgccacgggtggcgacgttcttgccgacttcgaaagtggcctcgaggtcgtcgatggccttgtcgaagccttccggaagctcgccggccttgatgcggtcgtacagggcagccttgtccgggttggccttgcgccatgcgtcgtacttctcgtcccattccttgtgggcttcgagaccgcgctcggcgaccttgcgggcgtgggcgagggcctcttcgtcaacgtggaaggactcctccgggtcgtagccgaggagcttcttgaggccggcgacggcctcggcgcccagcttggagccgtgggaggacgggtcgttggtcttgcccggggtcggccatgcgatcagggtgtcgaccttgatgagcttcggctggttcggggcggcggcgcgggccttggcgatggtgtcggccaggccttcgacgtcctccttgtaggagccgtcaggctggatgaagctgaactcgtcggtgtaccagccgtatgcctggaagcgcttgagcacgtcctcggccagcaccaggttggtgtcgccttcgatctggatgcggttggcatcgaagatcacggtcaggttaccgagctgctggttggcggcgagggaggcggcttcgccggagatgccctcttcgatatcgccttcaccgcagatgacccagatgttgtggtcgaacggggactcgccttccggagcttccggatcgagcaggccacgctggaaacgctggccataggcgaagccgatggcggaggcgaagccctggcccagcggaccggtggtcatttcgatgcccggggtcaggccgtattccggatgacccggggtacgggtgtcagcgccgccacggaagttcttcagatcgtccagggtcaggccgtagccggagaagtacagctggacgtactgggtgagggaggcgtggccaccggaaagaatgaagcgatcgcggccttcccagttggggtcgttcggatcatgcttgatgaagtgctggtacagggtgtaggcgataggcgccagggagacgggggaacccgggtggccgtgtcccgcacgctcaaccgcgtcggccgacaggaccttggccatcttgatggcgcgttcgtccagctcggtctccttgaattcggtcatggattactttccttccaattggtcgggccgcgtatccggcttgtgccgagcgctcgacgccctcacattgcgtttcccatagtagcgatgtgaggtgacgttgtggtgaaattttggcgtgttttggtagtttgtgtgctgttagcgctcacaattaacattcgcgtgaacttcagatgttcgtttgtcgatatatctcccaatgccagtcgccgcaagcctttgccgcatgaaggaaactactctggaagcgaacgaattagcactccgggtgccggagtgctaaaacattaaaagaagttttccgggtacgtctcatcagcaccgtcaaacataaggcgtaccggcacacacctatgcataaggaggcgcgcatggcgcaatcaagacgcatgctggtgttgcgtgccgtggtcgaggattacatccgttctcaggaaccggtgggttccaccacactgacccgggatcatgacctcggcgtcagctccgccaccgtgcgcaacgacatggcggccttggaagatgaaggctatcttattcagccgcacacttcggccggcagggtgccgaccgaaaaagggtaccgttacttcgtcgaccgtttggcgacggtcgttccgctatcggaggcccagcgccgcggcatcaacagctttctgtccggatcggtcaatctgcaggacacgctgcagcgggccgcccggctgctggcgcagatcaccggacaggtcgccgtcgtggccgcgccgtcactgtcgaagtcgacattgcggcatatcgaaatcgtgccagtgtccattaatacgctgcttgccgtagtgatcaccgataccggccgtgtcgcgcagcatatcctcaacgtcacgaaattgccggacgtgacgacgctcactcatctgaccaacgagatcaacacgcaatgctccggcgtttcgctgacccgcacggccgattgcgtacgacagatgggagcgcgcaaggaataccatgcgatcagcacgcttgcggaaacgcttgcgcaggcctttgatggcatggcggatgacgaacgcgcgagcgaattgtacatggcgggcacttcacggcttgcgcatcaacgcacggtggccgacctggccccgctgttcgacgcgttggaggagcaggtggtgctcatgaagttgatgagctcgctgagcgaaaccacgcaatccgacggcgtcggagtggcgatcggttccgaaacgcacacgcccggtttgctgcacgcctcagtggtaaccagtggctacgggcgtacctccgcggccgccacggacggcgcgacgcatgcggccgcatcatcacagacggaaaatcaaagcggtgatgatacgcagcaggcgggcgaaccggtcgcattcgtcggatcgatcgggccgacgcatatggactacgcggcgaccatggccgccgtgagggcggtcgccagatatctgacggcgttcctcgcccacgatgaaggtcagccggccgactgaccccgccttatggcacaatgacacgcagaaccaacagggagaaagaataatcgtgacggactattacgaagtgctgggcgtcgaccgttcggcaagcgacgacgagatcaaaaaggcgtatcgaaagatgagccgcaaataccatcccgacatcgcaggtccggaattcgaagacaagttcaaggaagtcaacaacgcgtacgatgtgctgtcggatcctaagaaacggcagatgtacgatgccggcgtcgatccgaacgatccgaatgcgggcggcatgcacggtggcggattcggtggcggattcggcgatatgggggacatcttcagcatgttcaccggtggcggattcggtggcaccggcggtggaccgactccgcgcacccagccggggcgtgacgcgcttgtttccgcgaccatcgatttgaagacggcggtgttcggcgacaccacgcacgtcaaggtcaacacgttcggcctgtgccaggaatgcggcggcaccggctgccagaacggcacacagcccacacaatgtcccgactgccacggtcagggatatgcgcagcgcgtggtacgcaccatgctcggccagatgatgaccaccgcgccatgcgaacgctgcgaaggccatggaacggtcatcgagaagccgtgcccgtcctgcctcggccatggccgcgtgcgcgtcacccgcaatgtcggcgtcgcggtgccggccggcgtggcgaacaacacccgtctgcgtctcgctaatcagggtgaggtcggtgaaaatggcggcgtcgcgggcgatttgtatgtggatatccgcatcaagccggatgacatgttcactcgtgatgacgacgatttgcattgttggatcaaggtgccgatgagttgggccgtattggggcacgaagtcgaaatcgacaccttcgacggcaggcagacgctggatatcccagccggcagccagccggacgataccgtgacgttgaagaacctcggcgtcacgcatctcgacgacaagaacgagcgcggcgatttggtggcgcacgtagtggtggagattcctaagaagctgtccgatgacgagcgggagctgattgagcggttcggcgagatgcacgacacggacgcccagcatgttgtcgtgaagtcccgtccgtcgtccggcgcgaagaaggggttcttctccaagctgaaggacgcgctgcgctagttttcgcaatccaatcgaatacgggacatatgaaaagaagtccgtatcccaactcataaccttgggatacggacttctttcacatctggcgtggcgggtgattcccgcctatttgagcagcgacctgcacatggtgcgatactggctcacatatcctccaccgaagaacacgcaatgtcctgcaatggggtagagctgccataatgtgatgcggtcctgccatccggccttaagcggatgcgccgactgatagccttcgaggatgtccgtaagatatgacatgccgaacaggtcgagcatggcaaggtcttcctcacggtgcccaccgtgagccgcaggatcgataagcacggcttcgacgtcaccggaatcagcagtccacatgacgttgccgctccacaggtcgccatgcacgcgtgcgggcttgtcgttggcggccttgcctaggatgtcgggcaaggcgtcgataacggcttcagtcagttccatgtcatagtcggtcagttcgcgacgtttcatgccgagtcgtaccatcggacgcaatctgccgtccgccagataggtggccacatcatcccaggcaccggtatccatcgggacgggatcctgcaatggcccgaaatagcaggtgccgtcgtatccagttggagcggagccaaaatgttcggcaccggcatcatgcatatgagctagcgcaacaccgaaatcgcgcgcggcttggatggtcggaccgcaggcgttcacgcgttcaatgtcgagataatccttgccccagtcgtatacgtcgaccacgcgtgggccgccctgcgattgcgcctcgccgagccatttgaggccgcgtccctcgcattcaaagaaaccttcggggctgaatgccctgcttttgcggtatttgcccatgccgatgagcctttctcccatgccggacatgccggcgtacttttggctccattgtgtgcatggtttgagacaactatgccgggatgccttgaaaactagacccctctcgctactcttggtcacggaaaaacagacgaaaccgtatttctacgaacataaagagggttcatgaatttcttccaagcgattttccttggcctggtgcaggcgttgaccgaatacttgccggtctcttccagcgcccatatccgtatcatcggcgatttgatgctgggctccgatccgggtgctgcgttcaccgccatcatccagatcggcaccgagcttgccgtgatcctgtatttccgtcatgacatcatccgcattctcggcgcgtggttcggctccttgttcggcaaggagggcaaggacttcaagagccgtatgggcgcgcataaccgcgacacgcagatgggttggttcatcatcatcggcacgctgccgattctgattgccggtctgttgttcaaggacgccatcgaaagcacgctgcgtaatctgtggatcaccgttaccgtgctgattatcttcggtattctgctgtgggtggtcgacgcccgcgccaagcaggtcaagaccatggatgagatgacctggaaggatgcgctgatcttcggcatcggccagatgctggcgctgattcctggcgtttcccgttccggcggcaccatcaccttcggccgtgcgatgggttatacccgtgaggctgcagtgcgcgtgagcttcctgatggccattccggccgtgttcggcgcgggcatcctcgaagccgtttccgcggtcaaggatgtggccgcaggcaatgcgggaatgttcccgggctggggtgcgaccatcgcggccaccatcgtggcgttcgtggtcggctatgtggtgatcatcggcttcctgaagttcgtgtccaccttctcgtacaaggcgttcgccatctaccgcatcgcgctggccgttgtcgtggctctgctgctgatctgcggcgtgctgcacccgacggaagtcgttgccgccgcgtaagcgtgattcggcgtaaataaagcgaatcccggccatccgtaaggtggccgggatttttttcgtctgcgacctcctcctggaggggaacgactcagacgccgttgcgtagaagtgattcggcctcacgaagcagttcctcgcaggcaggcatgccattcgaggcgattcgcttcgctctcgcgtccaaatcgtaatcatgttccagacgagccaaatagtcgccggcatgcatgtctgacaccaatccatcggcgtcggaacgccattgcatggcctttctggtcaaatctccttcaataagcggatactcgattattaaagacaaggcgcgcagcagctccaaagtgccttgcatgcattcggtattggcacagtaatgcggtacggatacccatatggatgttgtcggaaagcccgcttcggcggcgaaggcgtcaaggatgttggggatgcccaccggaccgttgtattccctgtcggattcgcattcgcagccgcttttggagatgtcaagcggcaatggccgtgtgtgcgggcattcatcgaacatggagccaagcgtgatgacatcacttacgtcatagtcttctgcgacacgtagcgtctgcctgcagtattcctcccaccggtaattgggttcgggtgcgatttgcgcaagcaggtgcagcatgggggagacggcaatgtcatagaaagtcgtttgcggccagatgatgcgcttacgcccctgcacggagcagatcatgggccgggccacctgatagtcgtagaaaccttcgttgtcaatatggcgcacttcctgcgactcataccgggacaccaaatgacggacgacgttcgtggccgcttggcttgcatcgttccatccttcgaatgcggcgataagtatcgtcctgggcattgcgctctcctcacacatgcttttaatgtataccgaaaacgggtggtgtgacacgcgcttcagccatcggtgaatacgaataaaccaaaccgcgacacgctgacttgcaaattacacgaatgtggttatagtagatactcgtgctcacgcagtgaatctgctggagacatgcggacatagcttagttggtaaagcgcaaccttgccaaggttgagaccgcgggttcgagtcccgttgtccgctctaaggttccgattgattatcgacctttatggtgggttagccaagcggttaggcagcggcctgcaaagccgtatagacgagttcgactctcgtacccacctcgcatcatgtgagattagttttcgcatgttggcatgacccgggcggttggcgcagaggtagcgcacttccctgacacggaaggggtcacaagttcgaatcttgtatcgcccactggagcattgctccgtacaaattaagactgggtgattggcgcagcggctagcgcacttccttcacacggaaggggtcataggttcgattcctatatcacccaccgttatcacagctcggttttgccgggttttttgtttccattccttttcacgctacttcgtcagataagaatgcaagcatcgacgcgccggcaaaaacagcgatcgacgaaaaacgattcaccacattacacaagaattgccgatgaaaatacaaagaatcaaacgagagaagcatgacttttgccaaacgcatttctaaaatgagtatcgtaaacaaaaaagaaaacaaacaagacgcaaggtgcgtcacagcacgccagcaagaaaaggaaacatcatgaacaagaacaagatcttctccgcaatcatgcgtggcttcgaagtcagcggcatcaacgctctgtcttcggctgccggctcctcttccgtcaacggcgctctgcaggagatcatcgacacccgccgctgatttggacaccacacactgaatccttcttgaaaaagcctggaacgcgattaaaagcgttccaggctttttgttccccggcaagcggctacaattgcctattgtgaacgagagacaattgaacctcaaccaaccggttaaggatatgggccccaacgaattgaaagcgtacgccgagctggggcagaaacaacacgatgaggcgaaccgcgaactggaacgacgctggcgcagctacgatgacatgctgccgaaggacgaattcgtatccatcatcgacaagaacgaacggtaaataccgttcacagtgtatgattcgtgaccatgccggccacaataccggccaattgcaaggggagagggtagaatgacagctatgactgatccgattccaagcgcaggcgaaacgaccatcattggtcttcctgctatcactgtaccggttacttccaccggagaccgtcctctgacgaaggaggacctcaatacgatcatgcgtctggccgacggcacggcgctcctgatttccaccaggggagcggtgtccggctcgcgttatctcctcgacgaggacgagatcaccgtgggacgcgacccgagttccgacatcctgctggacgattccaccgtctcccgcacgcacgcggtattccgcaggattaacggaaagtattcggtgattgacgccggcagcctgaacggcacatacgtgaaccgtcaacgagtggatagccaggaactgaagaacggcgacgaaatcattctgggcaagttccgtctcgtatatttcaccaacaaggccgtcattgcctaatgaaacgcccgatgcgggataaactgtgagtaacggttttccttcaatcgcctatgggctccgaatggaagctcataggcgattgttttatggcgtgtaggagaagacaatggacggcgaggcagaaccaacaatgcggttgcatctgcacgtgtcgcacgcggtgcagggggagttgttcccctccgcggacgcgcagcccgtcacacggggctatcgtggtacggtcgcgtcaaaagtggcgggtatcacgtaccgtcagcttgactattgggcgcgtaaacagatagtggaaccatccatcaccccgtcgcacggatccggctcacgcagattgtattcgttcaaagatgtggtgattcttgccgtttccaaaagattgctggatgccggaattaatctgcagaacgtgaccaccgccatcggcttcctcgcgcagcgcacgcccgaacagttggccggcatcaccatcatgtgcgatgggcagaatgtgcatgagtgcacggacagcgaacagatggtggctctgctacaaagcggcagagctgtgttcggggtgtccgtcggatcgctatggcatcagatcaaagaggctctagaacatgaggaatatgtcgatttgacgaagacgccggcatcgacagacaccaataggccaatcgacgacattgccgcgatacgtatgagaaagaagctggaatcgcggcgcaaatcccgcgcagcagcctgatcgcatacaattggtacgattcagcccggaacattcgaacgatataacccgcaggggagtagcgcatgcttgatattctgccggcactgttgtggatcatagccgccgtcatcgcagtgaacatttgttcgattactgcgattcgaggcaatctgttttccaaaaaacaccgcgatgtgcatccggtgcgttggtcgatcatcgcgctgcatttcacctcattggtcattggcgcgttgccatatccggtatatgcgatgttcaggtcggatttctcggcgaagttccggcgtttctacgaacatgtcggatggccgtcggctgcggtgatggtcatgctgatcgcagcggaacttgttttcatgtatcttcaggcccgaaacggcatgcacagcgagatggagcggaagctcaatcaggccgtcaaatagaaatctgacataacgtacattatcggctttttaggaatgacgtttttccaggcttgaggaagcgtcaaacacgcggttctgacataacggcctccgtcactcaataaataaaaacgtggttgctgccacgatattgcgacagcaaccacgtaactggcctacagcgtttccgtttacggactcaggcgaaatactcctcgacggcctgtgcgagttcatctaccgaatccagaatacggtatgcgccatgggctttgagctctccgggctccgcatagccccagccacagccgaggcagtccaaaccgcacgccttggcgccgtcggcatcggtccaacggtcaccgaccatcagtgccttgtctcctgcgttctcgtcgaaatcgatgtgctggaaagcccaacggatcacttggtccttgtcaagacgggaattgtcctcgctggcaccgtagatgccgtcgaccatggtgtccaagtggaaatgctcgcaaatcggaatgcattggtattgcggcttgcagctggcaatcgccagatagtatccgtcggcacgcagtttggcgagctgctccggaataccttggtaaatcgtgttgttcaggcggccggggactttctgtccgggattgttcgggtcgtcgaacacggcctcgtcggcgtaatacttgcggtaaatcctcacgccttcgtcaagcttgtcatccggaatgccgttgcgttgcatcgattcgctgatggccggtccaatgaaacgatgcaattcggcatcgtccggcaccggatatcccatctcttcgaacgccttgacaacgcagccaatgattcctggatcggatttcgtcagtgtgccatcgaggtcaagcagaacgactttcttcggatgttcggacatggatctgattctccccttggctgtgtgctataagaattgatgacagaaacaattatgcccggtctcaatgaccgggcattcgttcaagtgtcgttcaactgcaggtcactcgtagtccgggaaccatccgtcacgatgcatttgcagacgcttctccagcaaagccttcagttcgtcttcggtacgacgttccatgagcatgtcccagtgcgtgcgtgtcggcttggcgatttcatcagcctcgtcgtcattgtctccttcacggtgcgcgacggcgccgcagcggcactcccactcatctgggaattctgcgccctcagcgaacggcagaatcgtacgatggcctttcggacacacgtatgcgacgtcggttcgcgccgcaaaatccacattgtcatcggattcaagcgacttcgcaccgatgctcatgcctcgcaggctacgttccgccatattgcttttgcctccttgattatctgcttactctaagctacaaaacacttcggacgtgtcacttattcccggcgtccgcgaaaaccgatctcccgattgcgcacatgctcagtcgacacctgaataggcgacgatgccacggttgacgttctcgtacgcctgtttcgcgatcggagcgagcgtttcggcgcgtttacccaggtatggtccggccacggcgatctgctgcaacacgtcggcgagacgtttgcatccgcgtacgaaatcgccgccggtcaaatcggtgccgtacagcacacgcgacaggctttcgccctgagcccattcgtagacgacatcggtgatgccgaaatcaagttggcgcggctcgtcgagggcatagtcctcacacagcatggcaatcgacgcgtgcacgcctttgagctgcgccgcacagacggcgacgttcccctgcattcctccgggataatggcgcggctctcccccgctgcctctgcgtggctcgtaaatcaacgacatgacggcgctggccagctccgtcgcatcgagtccgtcgaacgcgccatcatcgatcgcctgggcaagcaccaaatcaagctcgctgtacaagtgccgcaacagctgtccacgttcggtaagccggtaatcgatatgttcttttgcgccttcatcaagccgatcgaggtatccgagctcgttcagcacattgcagatgcggtcgaattgacgtgccacggagccggtgcgtgaatcgtagcggtgctgcacacgttccaattcacgcatttcacgcgcccaccgatgcccccatttgagatgcttctgaatatcggggcatttgcggcagggatggtccctgcctttttcgcgaagctccgcgatacgcctgtcaaggtctttgaacgcttcgcttcgcgccttctgcgtgcggaacacctcgtgcttgagtttgcgtcgttcgttcttttccaagtcgctcaagcgcatgcgcagccgcatgaactccttgaagtcgccgaactcacaatcgaacgcccgttcgtatccgtccaacgctttgcgcaacgtatccatctgcgcttcaagctgccaggcggattcgttggcctcccattgcgcgaaggaatggtcaagcgtgatgcgagcggtctcgtaatcgctggaattaagcaggttgacggccatgttgaacgtcggtttgaaactggagtgcagcgggtacacgcgcttgctggacagcgcggcggcagtggcgggaatgaagccatgatggtccacaaccaccgcatggccgatggtgtcgatgccacgtcggccagcgcgtccggtaagctgggtgaactcccctggcgtcaatccgacatgcccggtcccatcgaatttctcaagtttttccaccaccacgcaccgtgccggcatgttgatgcccaaggcaagtgtttccgtggcgaagacgaccttcaccagcccctcttcgaacagtcgttcgacaatttggcggaagagcgccaccatgccagcatgatgcggcgcgaatccttcctccaaggcgaagcggaactgcgagaaatgcaaagccttcaaatcctcttgactgagttggccttcgaccatctcatcgacgatacggcggatgcgacgcatctcgtcatcggtggtgagttcgagtccggcgttgatgcattgttcgacggcctgatcgcatccgttgcgggagaagatgaaatagatgcccggcaggatgccgaggaaattcaattcatcaatcacggcccaacgacgtggcgtatggcgttcgggtctgcgggaatggtcgttccatttgccgcccttgccgccctttcgtctgtcggggcgctgctctcccctacgtttcgcggccttgcggtcgagctgatcgagcctgctcaccagctgggcgttgagcttgtctgtctgattgccgtctttatcacgtcgatacaggtcgatgagttccggttcggtgtggtcgtccgcctgaacaagcacatgctgttccaacggcacgggccgtttttcggacaccaccagcgtggtgtcgccacggaccgattcaatccatttggagaagtcctcgacattcgacacggttgcggacaggccgatgattctcacgctttggggcaggtggatgatcacttcctcccacaccggcccgcggaaacggtcggcgagatagtgcacctcgtcaagaatcacgtaacgcaaggcgtcaagcgtcatggaatgctcgtagagcatgttgcgcaggacctcggtggtcatgaccacgatgtcggcttcggagttgatggacgtgtcgccggtaagcaggccgactctgtccggcccgtacgtttcgaccagatcatggtatttctgattgctcaacgctttgattggcgtggtgtagaacgctttgacgttacgctcttgggccagatagatcgcgaaatcagccacgaccgtcttgccggctccggtgggcgcggcgacgagcacattgtcgccggcttccaacgcatcattggctttgacttggaaatcgtccaattcgaatggcatggaccgtgcgaaacgagacgagaccgattggcgtttggcctgcgtctgtttgaacgccgcatagcgttgcgcgggagatagggctgtggtcatctcggcatcgtatgtgccggtgtcgttattgccatgtcgacgatgatgagtcatggttccttttcgaatcagtcgttggaatgtttccactgcgcccactgccgggcatgacggacgcgcttttcctcacggcggctgatgacttcggcatgagcgtcgatataacgattggccgcgtcctcaagtggacgtgtgaagaacggggacgtgttctcctttggttgcggcaacggctcggacatggcctcgaaacgtttggacatgcgtccgcctactttgatggcatctttgaacgcatgatatccgcggatgcatgcgtatgcgccgccgccgaccagcatcgtcagcatgaacaggacgagtaccagccaaatccaccaaggcatagcgcctcccccgtcagtcttcgttctctcggtcgccgacgctcagctcatgctgtgctcgggcgatgatcatcgtgcgcaacgtctccggcgcgacggcagtaatatgacgggcgtgcgcgatgcagaacgcgacataccaggaatcggaagacacaatcagatgcaccttctcgccttcgccgcatttctcgacggtggctcccgacaggctgtcgatgaacgacaggtcgtcctgattggttatgaacacggcaggtgtgccattgtcgaaactccacttgcgcagttcggatgcgggcacgtccggaatgtccactttttcagtgggttcgaccagctccgcatgctcgatgcgggagatgcgaagcacctgccagatacgaggcttgccagtagccttgttgatggtcgtatccgtcttgacgaacttcatcttgtccgcgggcgccgcgttggacacgtcggtccataccgccacgtagtaaacgccttcgtcgacaaaaatcttgtctggcgccactagcttgcgctgtatacggcccgcaccgtccgtatattccatgtcgagcagcatgcctttggagatggcgctcttgacgatggagaagttccttggttccatctcgtatccggtcaggctcagccacggcatgtcgccaggcttgacgtgctggcgcagtcggctgtacagcgattccgcctgctcacgcagcttgtccggaagcaaagaggagtgggcgagatagctcaccgatgcggtcagcatgctcaggtactgctgggaaatgccggcaagacgttcaagccccagcgaattcgtggcggagacgatgccttccgcgtcaagcaaggaccaatcgatatcgaaaaactggcttccggccatctcgccatcatcggacaccgtggtcaacgtgttgatgtccttatgaatgatgttgacgaacttcttcaattcgtcatcggacttcggcctgccgatgaatcgttccgcaagttcttcaagagagtattcctcacccatatgggcggacaggaacagcatcaggcgaagacgccggtcgacctcgctaccggtctggaacgcggagttcttcttcggacggcccttgccttcctcggtatcatcctcatcagtgctgttgcggttgatttccggagacaccacggtggagctgtcggtgccggtggattcatcggccggcacgaactgcgtggccgcatgcagccggcggttgaacgcgtcgacagcctcctgagggctcactatggacgcacccggatgagacagcacgaacatggccagatcatcggagtcggcgtaggcgacattgagatgctcgccatcaacatccacagtggcggcgaaacgccgctgatcgaccactttgaccagctcgtcgggaatggattgcgtgccaagacccggcgcgatggaatccaagccaagtcctggaatcggcgtctgcggcacgcgcggcgcggtacgggaagcgtgctggggttcgtgcgcaggagccgaggaaatcgacatggagcgcgcaaggtaattcgcagcggcaagaatcggcagatcctcgtcgccgaacagcagacgcacgcgcggctcatcgccaagctgcagacggtaggaagcgaaatcctgcccttctgacttggaggaatattccggctgtcttgattcgatggcgatgcccatggcggcgagcttggcgcggtcacgctggaattgcttggcgaaggcggccttcgccgcttgatcggcgagctctccgtacgaatcggcatacgccttcacacgttgcgcaatctgacgtgaggtaagccattgcggaaaggctgaggagagcacagccaacacatcaagctcatgcttgccccatttgtcggaaaaacgtcgcctaccgttacttccctcagccattagtcctcacgtctcgttaacgtttctttttaagtgcttggcctcgtaagccgcacacaacattctatgatagaggttttttaagcgatttgtgcctatttcacgaaaaaacatcgttttcgtgttgcatggccgtccaaaatcagacccaatcgtccggttccacgccctgcgggccgacatattcgccattcggcacatagcttggttcgccttgatcctccagtcgcgcgtcgctaaacagcatcacatccctgccgaaggtccaatcgccatcgatatcaacggatttcgccgcggcgagcgaaggcacaccgtatgggaaacgggcatcgaaatcgtggatgttcttgtaatagcgcgcgtccaaatggacgtcggggaagatgtagttgccgtcttccatctcgtactggtccgtcagatggaatcggtcggaccgcatgatgaacaaatcgtcagtggtcttcaccggcaggaaacgcatacggtcgacgcatacgcaggtcgcgccatcgaaaagcgacaccgcggctcccatggcggtctccagctgaatgaccggctcgctggtcggatcggtcgggtcgaccgtcttcttattgcggattaccggaaggggaagcacgccgtcataggatgcgagtttcgctttcagcgcatcgatacgcacccaaatgctgttcgtgttgaagtacggatgcttgtcgatgttctgcgcgtcgtccttgtcgtctggatggacctggctcatctcacgcagcatcagacggcccgtggccttgtctcgcacgatgtggccgcccttatgatcggctggggtgcgtttggcgacctcgatcatgaacggtgcgcccgtattctcgaaatgctgcgcaagcgtacgggagggacgcgcgcccaggttgtcggaattggagatgaaaaggtatttgaacccctgcgcctcaagcgcgtcaagcagaccggattcccaaatggtggagaacaggtcgccgtggcccggcgggcaccattcgagttccggattggccgggaagctgacgggcattcccgtttccgcgctgatcttcggctcctgatgctggatgatttccatcgggatgtcttcctgatggaatttcttattggtctgcagcaccttcatggtgtctttggaggtacggaaggagttcatcagagtcaatggcagatcgacgccaagtctggtccgcgcggtcaacacctgtccgatgatgatgtcgatgaaacgcatctgccgtgccttgtggcgacgtaccggcagcagcgacttggcgcaatcgagtcccatcgaagtgccaagaccgccgttaagcttcaggaacgccgttttggcgaacgcgtcaacggccttgtcgtgattgatggtctcatacacgtcatggaagctgggaacactgacgagcggttcgacctcgtcctcacgaatccaactgctggcctcctcattgcgccagacctcgtacagacgacggaactgggcgatggccatgtcggtcattccgtgcttccgcatcttcgcggcagagtattcgaatacgtcctcagtcaatgtctctccctttcgaacgggcgttgttattcgatgcgcttatgccataatacgacattccgccaaaatcgggggcatttagacacagaaccaacatgaacttccggtggagcaattgccggaaaaccctcaaatatccgaagccaaactctccggaatggatgcgactcgctttccgacacgatgtgtttgaaaaaccgtagagattatgctatgcttcatattcggtgcttttcgcaccgttcggaccatagcgcagtttggtagcgcacttgactgggggtcaaggggtcgcgggttcaaatcccgctggtccgaccaagaaagcccgtcgttccgccgttttccacggcatcggaatggcggggttttcgttatgtttgggcaggtttgggcagtgaactgcggcatacagcccctcagaatggcatctatcggagccggaagccggacgtcaggacggtcttgagcgcatgcaaatatgtagcctgcgatatttttcatgtttcttgccgtttaatgcgattaacgcatgggttcagagaggtgattcggtttgcagcagaacgacacgcagccacagttcgatgacgtcgacgaattcgcccatgtgttcgattcaacgcttcccgaagatgaatggaagattcgattgccccgcgagcttggcttggaagcccgcgaacgcgctcggcatgatggcatcacgcttaccgaattgacccgcagggcactcttgtccgacgattccgatggctgttcagacgcggtcggcatcgggcgcatgccaaagaacagcgacgggcgcaaacagcttggcgacgaatggaagatcaaactcccctacgccgtaggccataaggcgcgggccaaggccaagcaggacggcatttcattaagctcgctcgcgcgcagagccataacggggtatctcagaacacgcaaccaggatgaacatcctctgttctgacgctgtcggcctaagctgtgcgtaaaggaaaacaaaagccggcaacgacccagattcaataaggcagatgggcgtgcgccatggtctaaaccaggcgcacgcccatcttctaacagttccggtggttacttgcgtttcttcttctcacggacattcaccgaaatctgaatcggcgatccttcgaagccgaattcctcgcgcagacaccgttcgatgtagcggcgatagccatgctccaagaagccggtggcgaagatcacgaagcgcggcggtctggtggacgcctgcgtcgcaaacaggattcgcggctgcttgccgccacgcagcggatgcgggtgggcagcttggatcttgccaaggaacgcgttgagtttgccggtggggatgcgcttgtcccatgatgccaaggcgccacgcatggcattggccaaacgattggtgtgccatccggtctttgccgacagattgacgcgctgagcccaagtgacgcgattgaactcggtcttccacaggcgttccatacgctgacggtcgaactcgtccatcaggtcccacttgttgaacacaagcacgatgcaacggcccgcgtccacggcctggctcatgaccttcaggtcttggtcggaaatcggctgggaggcatcgaacagcaccaaggcaagctcggaacgttcgatcgcggcctgcgtacgcaacgaggagaagtattccgcgccggacagcttgtgcagacgacgtttgatacctgcggtatcaatgaacagccaatcctcgccatcgacggtgacgacctcatcgaccggatctcgcgtggtgcccgcaagatcgttgacgacggtgcgttcctcgtgggccagctgattgagcagggaggatttgccgacgttcggacgtccgaccagagccacgcggcgcagatgcgacggcgtaaggaagccggatgtcctttccgctttctccaacgagtcgagtgcggcgtcaagcagttcaccgatgccacgaccatgcatggcggaaatgccatacggctcccccagacccatcttccagaattcggcggtcaggtattcgctttcgcgatcatcgaccttgttcaccgcaagcgtcaccggcttgccggcggcacggagcattttgacgatgcgttcgtccgtgtcggtgaggccaaccagaccgtccaccacgagaatcacggcatcggcaagctgcacggcgatttgcgcttgggatgcgatggcggattcgatgccttccacgtcggcttcccagccgcccgtgtcgaccagtttgaaatcggtgccgcaccattcggcgtcgtagctcacacggtcgcgagtcacgccgggggtgtcctccaccacggctgcgcgacggccgagaatacggttcaccagagtggatttgccgacgttcggacgtccgaccacggcaagtacgccgaccggtttcggaccattcttgctttcgccaccagagaacaccgttccatcgatcagctcctcatcgccttcatccagctcatagccttcgaggttggaaacgtactggcggtattcctgttcctcgatggcgtcgtcaacgatacggacgagcacgtcaagggtctcgccgaagttgagatcggagttgtcgacggtcaacacgccttccgcggcggatgtgaagttggtgactttcgaatcggccttgtcgcgtgccgcgacattctccgcacccacacctgagacggcctgtccgctacgtcgggcctgacggacctcttcacgcgcggtaagcaggatgcgcacttcggcgtcgggagcgacgacggtggtgatatcacggccctcagcaacaataccggcgccttcggagaaggaatcgaccgaagcctctcgtgcgatgtaggcacgttgcgcggcgatcaacacgtgacgcacggggatgatgttggacaccttggacacgtgcgaagagacctcggaagaacggatggcctcgctgatgtcctcgccatcggcgtacaccttcggatcgtccggatcgacgctgatgtcgaaatggccgtcggtgaagaattcgccgacggtttcggtgacgagctgctcatcgatggtttcggcatccaaatcgatgcctttgtgcatgcaccaccaggcgcaggcacggtacatcgcgcctgtgtcgaggtatgcgaaaccataatatttggccagtgccttggacgtggatgatttgccgacgcccgcaggcccatcaatagctacacggatcacagtcccaccgccttggatagagaacggacctcagcctgcgacaacacgcgatacgtgccgcttttcaggtcgccgagtttgatcggaccgatctgcgtgcgtaccagacgcttgacgggaaaaccgatcgagccgaaaatacggcgcacgatgcggttcttgcccgaatgcagcacgaccttgaccaacgtgctttcgcggctggagtcgagaatagcgcagcggtcgagtttgatccacccatcgtcgagcttcacgcccgtggtgacgagcctgcggcacacctgaccgctgatgcgtccttccagcgtggcgatgtaggtcttttcgacctcatatttggggtgcatgacgtgctggctcagttcgccgtcgttcgtcatgaggattaggccttccgaatcataatccagacggcccatgtggaaaatacgctcgtacttgtctccgacgatgtcgcgcaaagtgtagcgtcccttgggatcctccatggcgctcagcacgcgtttcggcttgttcaacgcaagcgtgacatggttagggttcacacgcacgcgagaaccgtcgacacggacctcctgacgtttcggatcgactcgggtgccaagttcggtaatcagctcgccatcgatctcaacgcgaccatcggtgatgatttcctcgcatttacggcgcgagccgaagcccgcctgagcgagaagtttctgcaggcgaatgccttcattgtcatgattgtgcgccttggcggcgcgagaatatgcgtttggcatcgttctcccaacgtggccggataatacttacagggactgctggtagtatggcagtcgtttggcggctttcataaaaaccgcaacttgtccactatatgacagaggaaagactatgactgctgttgaagcaacgtccgtaacagaggaagaacagagcaagccactggcccttcgcataggcgcggagctggtgggaagcttcatcatctgcttcgccatctactcgatttgcacgcttggttccgcgatctacggcgtgaatatggcgttcatcgccttgctgacaggtttggtgtacgccgccgccaccctgatattcggcacgatttccggcgcccagttcaatccggcggtctccgttgcggcgatgctgtccggcaaaacccatgtgcttgacggagtgctctatattatcgttcaggtgctgggtggtatcggcgcaggcgccgccatccgcttcctgctgccgacatccgagcaggtaacgctgaaaatctggctgacgccggtcattaacggttttgacaagaattccgtctcctatgccacgctcggcaactatggcgtgtccttcagcatcactctggccatcgccgttgaactcgtcgcgggcatcatcatcgtcgccaccgcgctcaacaccaccagtgaatccggaaagaccaataccagccatgccatcgccatgggtctcgcctacggtgtcggcgccgcaatctcctatccggtaacaggcgcagctctgaatccggctcgtgccactggcatcgccatcttcgcccagaatcagggcctttcccaagagcctctgcagcagctgtgggtgttctggatctgcccgattctcgcagccgccatcgtctcgcttgtggccatagtcgcgtccatgatcggcaccaagaaaaacgtttcggaagccgagcaggattccgaaacgctggaggccatagccgacgacgcgtcagacgatgccgacgggcacgagggcgagcaggatgaacagtccgacgcccagaccgatgccgatgaaagcgtcgaagccaactgaacggactttccaaggactacgctcgcgcattacgagtctgattagtcctgttatgatggccgtcaccgcgattaccgtggtggcggcttttacatggcctaagaccgcaagcactgtggctataaccaccattgccgcaacgatccattcaaaccacggcttgccttcatggtcttcggaaacgtagggatgactcatatcgcaggcctttcgttatatgtcaacgcgcgtccgcgcacggaacccaatcataataataaaacgtggcgtccgaaaccagcgaatggtttcggacgccacgtcatttatcgcgccgcaacgctcccagcttgccggtcgacgcttccactgaactcagtggaagaagtgtcgggtaccggtcacatacatggtgacgccggccttgcgggccgcctcgaacacttcctcatcacgaatggacccaccaggctggacgatggccttgacaccggcgttgatcagaatctcggcaccgtcggcgaacgggaagaacgcgtcggacgcggccaccgctcccttggtgcggttggctccgtcagccagcgtgttggcacgctcgacggacagattggcggaatccacacgattgacctggcccatgccgatgcctacggttgcctgatcgtgggcgataagtatggcgttggatttgacgcaccggatggcacgccatgcgaacaccagatccctgacggtttcagcgtcggccggctcgccggaaaccagcttccacgcgttcggatcgtctcctgaagcgtcaatcagatcggtggactgcacgagcagaccgccgtcaatctgacggaactgggtcttggtcttcggaggctcagacaccttcaggatacgcaggttcttcttcttggtctggagcagttcaagcgcatcggcgtcgtaatcgggcgcgacgatgacttcggtgaagattggacgaacactttcggccatttccatggtgaccttgctgttcgcagcaatcacaccgccataggcgctcatcggatcgcatgcgtgcgccttcttgtgcgcctctgccacggtagcgccgatggccagaccgcatggattgttgtgcttgaccactgcgacggcgatctgaggcgcgaaatcccacacggcacgccatgcggcgtcggcatcgacgtaattgttgtagctcatcggcttaccgccaagctgttcggcgtgtgcgaagccgttctggttgagcggatccagatacagcgaagcctgctggtgagggttctcgccgtaacgcagcacgtgcgcgcggtcccacgtacgggtgaacgtggctgggaacttggcctcattcacttcggtctcgccttcggaaaccggctgttcgatggacgccggcttcggccaatgcttcgcggtccactcgttgatggtggcgtcgtaggcggccgtatgggcgaacgcctttcctgcgagccagcgacgctcatcaagggagaagccctcgccgttctcgatgcgggaggcgacgagtgcataatcgttcggatcggtgatgatggcgacggtggcgctgttcttggctgcgccacgcaccatggacggaccgccgatatcgatcttttcgatggtggcggcttcgtcagctccggagcggaccgtgtcggcgaacggatacagattgacgaccaccagatcgaacggcttgatgccaaacttctcgagctgggaggcatggtcggggttggtcatgtcggcgaggataccggcatggatatgcgggtcaagggtcttgacgcggccatcaaggcattccgggaaaccagtgacttcggagacctcggtcactttgacacccagctcagccagacgcttcgcggtggaaccggtggaaaccacctcggtgcccgccttgatgaacgcttcggcaagcacctcgatgccttccttatggaagactgataccagagcccgtcgtatcggtcgattcgttgttgtcaccctgatcctccttgttattgttgttcgaggcgaccgtgcgaagcgcacgtgtttcctcacggctgttttccgtggattcgggagcggtctccctctttccacgttcgcgtatacgcttcatcatccagcgtatggcgaaaaatatgctcacggccaccaaagtcagcagccatgcggagaacaaacccatggcggtgggttgtcccaccttacgggttgacgcgatcacgtctacgccgacgtgcgcaagatgtttcgatcccaagcctccgtttcccaaggcgaacagcaagctggaagccacggacacgacggcgctggtaatcgaaaaagcagcaatcggataggcaaaactcagcacaacgcgtttgacgtcgatgttccgtcctgattcacctactctgatatggaatcccttattaaacaacatgacgaccatgccggtagcaaaagcggatgccaatggtatgcacatcagcgcgattctcacccaatccgtctcaaccgcctgtggcatcataccgaaaagcggcaaggcggggagcccgtcgccctgcccggtccataatgtgaattcggctaaatcgccgattgagaagccggcgccgaaagtccatgagacagcccaaatcatcagattcggaagccatgcgagcatactgatcgtggtaagaatacgagacccgttctgcatgcccgaaagttcatatagcttcgctatcgatgattgattgcttattgcccaaaaaacaacgacgatcagaccgaccagcagatacgccgcctccagcagcagccctaggacggaaccgatgaccatggtctttcgcaccggcgatgacacatgagatcgaatccattcggtacaggcttgggtccatgacgcattcggaatcgccgcgaccgcatatccgaggatgaaaacaagcgccgttttgatggcgatcatcgtcatcgaatcaacgatttcgatatttatgcttctggcgaagaagatgtttacggcttcccaaaagaccagaccggccgcgaatccacgcagactcgtgccgaatcttctggcgagctgcgcgataagggcgataagcagtaccgtcaagagcaacggcacaatcgtcaacgtgatgacatcagtcttgaacccgataccttggctgagcagcaccaacgcctcggtaagaggcaccgagaaggcggagagattgcccccgccttcttccatggatatgaccagaagcattagggccatatagcagcccaaggcaacggcgtaaataatcatggacgctgccgcgacggcaagccctttcagccaatacttcaggttcgtcatcatagcgattgggaagcgagcacctctcgcatgatttcagcggtctgtccgggagtacgaccgacacggatgccaacggcctcaagggcttctttcttatcctgcgcggtgcccttgccgccggaaacgatggcgccggcatggcccatctgcttgccttccggcgcggtgaatcccgcgatgtaggccacgacgggcttggtcatatgttcggaagcccacttggcagcgtcctgttcggcgctgccaccgatttcgccgatcatgacaacggctttggtggcttcatcgttctcaaaggcttccaaagcctcctgcaaggtcgtgccgacgatcggatcgccgcccgcgccaaggcatgcggtgaaaccgatgtcagacagctcccccatcagctgataggtcaacgttccggacttggacaccaaacccaacgggccgcgggacacgatgccatctggaataatgccgaggttgcagcccttggcgtccttagaagatggcagcgtcaacagaccaggacaattcggcccaacgatgcgcacgcccttacgcaaggccaactcgacgaaatacgcgctgtccgccaccggaatgccttcggtgatgacgacaatcagttcgatgccggcttcaatggcctcaacgacggcgtccttggcgaagcgcggcggcacgaacacgacgcttgctttggctccagtggcttcgatggcttcagagcagttggcgaacacgtgaatggtggcgtcctcgccatttttggcttcagggaaggtgacgtccagcccagccttgcgggcgttcacgccaccgacgatgttggtgccggccttgagcatgcgggccgtgtgggtcataccctgatgcccggtcatgccctggacgatgaccggagcgccatcttcaatgaaaagcgtcatttcagcgaacctccttggccgcgaaacgtgcggcctgctgtgcggcttcctccatggtctgagcgacgtgcaggttggcgcggccggcttgggccaaaatgttcagaccttccgccgccgcattgccatcgaatcgcacgacgataggcttgctgctgccaagttcgtcaagcgcctcgagaatgcccttcgcgacctgttcacacgaggtgatgccaccgtacacattgatgagcacggattcgacctgcgggtcggacagcacgatttcaagactattcgacatcacttcggcggaagcgcctccgccgatgtcgaggaagtttgcgggcttgacattcgtgccctgatcctcgcctgcacctgacaccgcgtcaagagagctcatgacgagtcccgcaccattgccgatcacaccgacggaacccttgagatgcacataatgcagtccatgttcgcgggctttttgctcatatggatcgacatgaatcggatcggtgaaacgtttccaaccatcatggcggaacgatgcattgtcatcaagggagatcttggcgtccagcgcgcacaacgacttggaagattcgtcatccggatcgccgatttttgcaagcgggttgatttccacaagcgtggcgtcgttctccttgaagcaatgccacattttcagcagaatctgcgcggcctgatcaacatcggcatgatagaagccgatgctttcagccatcttggtggccgcttccaaatcgaaatcgtcaagagcatcgatatgcagacgcttcacggattccggatgctctttggcgatttcctcaacctcagtaccgccattcgcagtggcgagcacgtcgaaatcacgagaggatcggtccactgagatggagacgtaatactcgtgaaggatgttcttcgcctcggccaccagcacgccgctgaccttgtgcttgtgaatggtcatcggcagaatgtcttccgacgcgagaatggactcgtcacgggtcttggcgagcttgactccgccggcctggccacggtgtccaatcttcacctgcgccttaatcacattgggatatccaatctggtcggccgcttcggcgacttcatgggagttctgggcgaatattgccttaggagtcgggataccctgttcttcgagcaattccctggcttgatactcatagagatccatggatcattccctttggttgtttgttctgaatggttgacgaaaacggagttatcaggcaggcatgcacaccagcgagcttgtcggataatcgcctagcgatttcatgccgtcaataccggtaagttccatgacgaagctgaatccagcaacgacgcctccgcacttctcgatgaggctacgcgctgcattggcggttccaccggtggcgatcagatcgtcgacgatcaatacgcgcactccctcatggacaacgttggtttcgatttccattgacgcctgaccatattcgaggtcatagctttgcgacatggtttctggaggcaatttgccggctttacggaccgcgataaacccctttccgagacgggcggccaacgctggaccgaacaggaatccacgagcttcaaggccggcgaccatgtcgaaatcatcgacgtctactggcaatgccgcttcaagggcccccatcaaaataccgaacgcgcgcgcatcagccaacaccggcatgaaatcgcggaataggatgccctccttcggaaagcccggaatagtacgtattttcgatacaagatatgctgcgtcttcggctccaactttgttcaagcccgaaacggtgatatccgatgctgccatgacagtggtttccttctaccttggtttacggcactttgaattataggtttcccgtgcgaaaaagaacggcgaaaacctcaaaaatgaaattttcgccgtctaaaaatcaaagaaatcaattgttcttctgctcgtcaatgggctgctgaataacatcggcatcctgtgcgggctcttcagtcgcgtcgacgataggcttctggtcgggctcgtcttccttggatagcggattgccgttctcatcgacctcatcatcatgcacgtatgccggacggacatattcacggctgatggcgttgaagccgaaacgcagttgcgatccttcggaatcaacgacgatctcctcgtattccgtatcgacggaaacgaccttgccgatgatgccaccgatggtgatcacttcagtgccgggctgcagactagaacggaaatcctgacgttcagcttgctgctgcttggctttcttggactgccagaacatcatgccgaacattacaacgataagaacaacgagaaaaaggatatccaaaataaactcctcggagtcagggtctcaaccggaacacattactcaagatgtgaagtctatgacatcttattgacatcatatgcggattcgtcgggagtgataccaagatgctcccatgccttgcgcgtggccacgcggcctttcggcgtgcggatgaggaagccctcacgtaccagatacggttcgcataccgtttccaccgtttccgactcctcgcccaccatggccgccagattgttcaagccgacggggcctccgttgaaattggtgacgatggccttaagcactgctatatccagacggtcaagaccttcggtatcgatctgataaagcgccaacgcctccttgacatcatcgggacgcaccgattcgagatcgtgcacgatggcccaatccctaacacgacgaagcaggcggttggcaattctcggcgtaccgcgggaacgcatggccagttggcgagcggccccgtcctccaactggattcccaacactgcggaggaacgctcaatcagcttttcaagctcctcatgcgggtagaaatccagatgcgccgtgaaaccgaaccgcgcacgcagcggcgagggaagcatgccctctcgcgtggtggcaccgataaccgtaaaccgaggcaatgtcagcggaatggatgaagctccagggcctttgccgaccatcacatcaacacggaaatcctccatggcgatgtacagcagttcctcggcggcacggggcagacggtggatctcatcgataaagagcacctcgccggcgtccagcgaactcagaatcgaagccaaatcaccagcatgttggatggcgggaccggaagtgacgcggattggaacttccaattcattggccacaatcatggccaaagtggttttgccaagtcccggaggccccgcaagcaggatatggtccggaggaacgtcacgttttcgagcagcatcgaggaaaagctgcaactgcgctttgagtcttggctgtccgatgaatcccttgaggatatgaggacgaagctcctcgtcgctgaccggttcgttgccgacgggtgcggcggaaaccatacggagggattcctcattcgccccggtgttcggctgttcgaatgtatcagtgttcgtcataatggtccgtttcatctacctctatccaacgatgtcagcgcgagcttcagcacgcgtggaacatcctcggcgttcaacggcgtctcgatttgattatcggcgcagaccgtctgcaccgcatggacagcgtcctgctggtgccatcccaaagacatcagaccttcgacgacctgttcggccccagtgtcttcaggagtcgaagcggttgcggaagaaccctcgatctggctcagatcaatggaacctttcagttcgaggatgattttctgcgcgcctttcttgcctaatcccggagccttggccaacgcagtggcatcaccatccgccacagccctcgcaagtcgatcgggaggcaaagtggacagcaacgatagcgcgactttcggtccgatgccactgaccttctgcaattgcaggaacatgcgtttcgaggccagcgtgccgaagccgaataaagtgatggcgtcctgggacacattcaacgaagtgtagaccttgatttcctggccggcgtgcatggaagccaagtcggcggatggcatcctgacctcgtagccgactcccccgacctcgataatggccgatacggcgtctaccgactccacatggccacgtagcatgccaatcattatggacgtctccttcgcacaggtctagaacatctgttcgatacagcttacatgcctctgcggacgccttgtctgcgcgctgctttttgcgaagcctgcgcccactgtcgttgcgccgccgtgagatgctgttcgcgttcgccgccttgcagcgcaccagccggacgcaacgcgtgacagatcgcaatagccagcgcgtcagccgcatcagccggctttggcagcgtgttcaagcccaatatccgcgccaccatacgttccatctggattttctctgctttgccgttgccggtgattgcaagctttgattccgtcggcgtatgcaatgctacaggaatgccgcgttgcgccgcagcgagcatcgccaaccctgccgcctgtgcggttcccagcaccgtgttacggttttcttgcgcaaacactcgttcgatggacaccgcatcgggagtaaatcgttcgattttttccaccaagccgttgtagatggccagcagacgcagatcctgggaggtttttggatcggaacgcaccacatccacgtggataaaagaaagccggcggtatgcgccggcttcaatcacgccgaccccgcagcgagtcagcccggggtcgacgccaagaataatcacgctggattactcctcgtcaagctgggccatgacctcgtcggaggcggtccagttggagtagatgttctggacatcgtccagatcatcgaggttgtcgatgagcttggagaccttctgggcatcctcaaggctcagctcgacctcgttcttcggcatcatgaccagatcagcggaatcgtaatcgaaaccggcgtcctggagagccttgcgcacgtcgatcatgtcggacggatcggtgatgacggtgaatacctcaccatcgtcggtcacgtcttcggcaccggcttcggcggccttctcgaacaggttgtcgaagtcaacgccttcggccggaacaacgatctgtcccttgcgttcgaagttgaagctcacggaaccagtggtggccagggagccattgcccttggtcagggtggaacgcacgtcggcggccgcacggttgcggttgtcggtgaggcattcgatgatcaggccaacacctgccggggcgtaaccctcgtacacgatgtcttcatagttggcgccgccggcttcctcaccggaaccacgcttgacggcgcgcttgatgttgtcggccggcatggaggccttcttggccttgtagatggcgtcatacagggacgggttgccgtcgggatcgccgccacccatacgtgctgcgatctcgatgttcttgatcagcttggcgaacagcttgccgcgcttcgcgtcgatggcggccttcttgtgcttggtggtcgcccacttggaatgacctgacataatgctcctaggcaggttgcggatgtttcaaacgaaatgattctaaagcggttcgccgacaaaatgccgaatacgaacctgtggcatttcgcttttcgaacttttggatggggtctgcccccggctgtgactaccgccgatatgttttctcccctatgaccatttggcgcttggcttcgaagatgcgttggaatacggtgactaatcccaatccggccaacagtatcatggcgatggcgagccacaatccctgacgcgtcaatccggtgatggccatgcccaccagaatgatggtcaagcgatcggcacgagtggcgatgccgtttttcacctcatagccgactgattcggcacgagcacgggcatatgaagtgacgaacgatgtcatcacggccaccgcggcggcggcgataccgatcatgctcgtatagtcaggcgtgttgtcgatggccgtatgccaccagtcacgatgcataagaaagaagatgatcacgcctacgagcatcgcccaatcagcgatgcgatcgagcgtggagtcgagaaaagccccgaattcggtcccacccgtggtaagcgcggcgatcgagccatccaacgaatcggcaagcacaagcagagtcagaacaaccgctcccccaaatagccatccggtcacaccggtggcgatggccacgacgatggtgccgacagcaccaatcaccgtcaccgcattggcggtcagtcctatggcgatcaacgctttggctattggctcgatgagttttttgaacggcgcacgaagatgctcaagcatgtgttacttccttctcgatgagaaaatgagaaacggcgcacaaacctcttgtcgagattcgtgcgccgtttcacggttcatggtcgcgtgcgacttgttgccaccggtctcgctcagtcggcgagggcggccttgaagtcgtctgcggtgttgacctggacgcgcttcttgattacggtcagaatgttcgccttcgcctcatcgaccggcacgccgttcaactggctgccgtcgcggaagcggaagctgaccgcgttgttgttcatatcctcttcgccgacgatgaggatgaacggcgccttggacttggatgcgttgcggatcttcttgccgaagcgatcgtcggacaggtcgatctcgcaacggacggtctcctcttccaagctggcgatgaacttctgcaggtgcggggcgaactcgtccgcgaccggcacgccaagcacctggaccggggcgagccacgccgggaaggcgcccgcgtaatgctcaagcagcaccgcgaagaagcgttcgatggagccgaacagcgcgcggtggatcatcaccggacgctggtgcgtgccatcggcggcgatgtattcgagcttgaaacgttccggaaggttgaagtcgagctggatggtggacacctgccaggtacgtccgatggcgtcacgggcctgcacggagatcttcggaccgtagaaggctgcgccgcacggatcgtcgaccaagtccaaaccggattccttggcgacctcggccagcgtgttggtggcttcctcccaaatctcgtcggaaccgacgtacttgtgcggatccttggtggacagctccagatagaagtcatccagaccgaagtccttcaacaggccgagcacgaaggtaagcaggctcttaagctcgtccttcatctgctcgcgggtgcagtagatgtgggaatcatcctgagtcaagccgcgcacgcgggtcaggccatgcacttcgccggacttctcataacggtacacggtgccgaattcgaacaggcgcagcggcagctcacggtaggaacgctggcgggacttgaagatcaggttgtgcatcgggcagttcatcggcttcaggtagtaatcgaagccttgcttgatgacgttgccgttctcgtccttctcctcgtccagacgcatcggcggatacatgctgtccttgtaccactgcaggtggccggaggtctcatacaggccgcccttggtgatgtgcggggtttgcacgaagctgtagtggtgcttgcggtgcatctcacgggagtagtcctccatggcgttgatgacggccgcgcccttcggatggaagacggcaaggcccggaccgatctcatccgggaaggagaacaggtccatttccgcgccgagcttgcggtggtcgcgcttggcggcctcctccagacgggtctggtatgccttcaggtcctccttggtggcgaaggcggcgccgtaaatgcgctgcagcatcggattggcctcgctgccgcgccagtatgcggcggcggaacgctcgatcttgaacgccttgatgtaacgggtgttcggcaggtgcggaccacggcacaggtccttccaaaccacattgccttcacggtcgacgttatcgtagaagctcagttccttgccgctgatttcggtggcggcttccgggtcaagatgcgcttccttatccttgataagttcaagcttgtagggctggtcggcttcctcggcaagagcctcttcctcggtcaccacgcggcggcggaaggactgggaggacttgataatgcgctgcatgcgcttttcgatttccttgaggtcctccggagtgaaaggagtctcgacatcgaaatcgtagtagaagccgtctttgatgaccggtccaacaccaagcttggcgtcagggcgaatctcctgcacggcctgggccatgacatgggttgcggaatggcgcatgatggccacaccgtcctcgctatcgagcgcgatgggttccacaacgtcgccgtcgtgcagctcggtatagagatcgcggggttcgccgttcaaacgcaccgcgatgatgttcttgtcgtcggagaagagctggacgccggtctggtctgccgccacctccttcttttcgccgttgagtgtgatggagatggtctgttcagccatgagttgtcctttgctatcggggtccgcgttaccaatgtgcaggcctggactatatatcaacgatgaacaagatagggtcaagcgcagacaacggcacgccatttcggtgaacggaagaacaacgctgattgaatgtcgcgaaaggaaaggtcctttactgtttactgtccgatgacgtgcgcatatgtatactgcggagcctgacgtgtggacttgatcatcactttgtcagaggggctgaccgataccgtagcgccatacttcactttgagccgcgacccgacgccaccggccagattaaccgcgttctgcagattgtcgctgtcgccgatcgcgcgaatggtgaatggggatttcagtttggtgccatcgcagacgagactgccggccgtgccactgatgtaagtgctggttaccacgcggacattgttgatctcaatgacctcggcaccactgttgcgcaattcctcaagcaacgtgaacaatatcgcggagtcaatcttctgtttggaaccctgcgatatgcggatgaccacgccttctcccgtagccgcgagacggccggataggatgccgttggtctgcgcgttctgcttggcgatttccgcggctttctcatttttgtccgcggtgtctttcaaagcgttcagctggctggagagttcgttcttacgctgttcgagcttttggacctgagcattggtctcgctgatgagcttggtcaattcatcttcgctcatcgtctcataggtggatgtcgtgttgtttatctggatcacatagccgaagccaagcaaggcgcacaatatcgtgaccagaatgctggaatacagtcgggttcgtgtgaccttcgcatcaagtgagattcgcttcttggccttgaccatggggaacgcaccggtttgggtgctgtcattgttctggtccttgaccctctgctcatggattctggacagcatgtccttgctgttcgcgtcttgtccgctcataccgcatcaacctttaaagatgaagcgtcgaatggaggacacattggtaaagattcgtatgccgagcactacgatcactgcggtctgcagctgggagccgactcccaactggttgccgaggaacaccagcagcgttgcggtgatgacattcgagaagaaggagatcacgaacactttatcggaaaagctgcgttggaaatacgcgcgtgcggcgcctagcaacgcatccaacgcggccaataccataatcggcagatacggttggagctcgatggggatgtccggacgaacgaatacaccgattaccacgccgatgataagtcccaagacagctgccattacttgtccttcctcacatgcgtcgtgtcgccagccactgcagcatcaagtgtaatcgatttgcttttgcttatctgcggatagatgccggcctttttgaaatcgtcatacagttgtttctgcgttgtcttgcttaccgatttcgccaaggtcgcctgattgcctatcgcctcgattcgatatgggctttgcaccgaattgactccgatgagaatcgtcgatccggcggttcgaatcgaggtttgcacgccaaggcggttgccgttgatcgcgatcgcctccgctccggattgccatagcaaggagacaagcagctgcaaatcggaatcggtgacgactcgaacctggctgccattttctcttggcagtgaggagtcggcattgtcgccgctgacggaaagcgggttggctacggtcaggacaatgccttccccttgcaccggaagcgttccattgaccatttcatcatcctgcatcgtctggtttagggaccagcttgccaaggattccgattcagattcgatttgcgaccgcaagtcgttgacatccttggtgaggtcgccgacccgcttcgtttgttcggtcagctggcttgccaactgcttgcgtacttctttgcgtgggtcagtgctcagctggcgcacgaaaacgcttcccgcggcacccacagcgatgcagatgaggaacaccagaatcctggtggcccaaatcgaaaccgccgaacgttttttagtggccaggcgggagtccgaatacaggacgtccatcggacgattggtcaaatcgtcaataagccgaagcgaatcgtcatcgacatgtctatggcgttgcggcatggcgggcatggaggccggttgcacatgatgggatgacaggccggcgaaggatgacgaaaaaatggcacgatgctttgtgggtacgttctccggggaaacggggaacgacgcgaaacgtggagcatcggacttcatatatgcgtcaatccttgctgtttgtatcgttcttcaacagttggatgccttggcgcatgtagatgtaccctgcaagccaatacagtccaacgccccagattccggtggcaagaccgcatagatgcagtgtatccgcagcggagttggaccagatgtcggcgaagatcaacgcgacgatggcgataagcagcatcgcggtaccggccttgcctacgaaatgaacaggcaatgggccataatcgtgctgcgccaaaaccagtatcagaacagccatgatcaaatctcgcagaccgacgacgatcagcatccaccatggaatgatgttcgccacacccaaagcaagaatgctgcagaagatcagcagacgatcggcaatcggatcgagaatttgcccgattttgctcacctgattgaatgatctggcgatcagtccgtccaaaccatcggatatcgccgatagcgcaagcacgaccaaggcggtcaccatcctgtgatgagagaccagcatcgcgataaaaggaatcgaaatgattctcagcaggctgatgaagttcggaaccgtgaaatagatgtctcgcggttccggactgtattgcttcttaataatcagtttgctcatattacgagctacactacattctcgaagcctgcaacgcggtgactattatgccacgggcaccaacttcatacaactggtccataagctggttcaccttcgccttcggaaccaccacacgcacagccgcccactgcttatcatgcagaggcgaaatcgtcgggctttcgaaacccggagtgatatccactgcggcggacaccttctcgaccggaatgtcgtagtccataagcacattacgctgggcagtgagcacgccttgcagacgcctgctcagaatcgtcagacgctcgtcatccgcctcaagacgaggggaacgaatcaatacggcttcagagtgcatcagcggttcagcgaaaatgcgcagtcccgcattacgcagagtggtccctgtggaaaccacatcggcgatcagatcggcgacgccaagctggacggacgattcgacggcgccgtcaaggtgcacggtttccgcgttgatgccatgctcgaccagatagtcgtgtacgagcttgtcgaatgtggtggcgactcgcttgccttcaatatcctcaagcttggtaatcggcgaatcgttcggggctgcgaaacggaacgtggaggctccgaagccaagctgcatatgctcctccgcatcggtgccggagttcacgagcaaatcatgcccggtgattccaacgtcgatggtgccgcgaccgacatagaccgcaatgtcgaggggacgcaggtagaacaactcaacatcattgtcggaatcctccacgaccaactggcgagggttgctcctcaaacggtagccggcttccgccagcatgttccaggcgggttcggacagcatgcccttattaggcacagcgattcttagcatgtttctcctctaaaaaaggccacaccttcaactggcatggccccgggtttctcacaggttcttgtagatgtcctcgagtgtgatgccacgatcgatcatcatgacctgcagatggtagatgagctggctcatttcttcggccgtacgatcagcaccctcatattcggcggcgatccaggtctctccagcctcttcgacaatcttcttgccgatgaagtgcgtgcctttggcaagctcatcgacggtcagggaaccggcctgcttggtggcggctttctcgctcaattccgcgaacagcgattcaaaagtcttcatagtcgtatgcttccttgtatggtgggcgttcacgccttgaaggctgcttcggccttctcgcggatggagtcgatagcctcggccggattctcggcaccgtacacggcggaaccggcgaccagcacatcggcaccggcttcggcaacgatatgggcggtcttggggctcacgccaccatcgacctggatcttcgtcttcaggccacggcgggtgatttcgtcacgcagacgacggaccttggccatctggttgtcaaggaacttctgaccgccgaagcccggttcgaccgtcatgataagcaccatgtcgaattcgtcaaggatgtcgaagatcggctcgaccggttcggccggacggaccgcgaagcatgccttgcagcccatgtcgcgcagctgacgcgcaagacgaaccggagcatgcgtcgctcccatatggaagctgacggaagccgcaccaagcttggcgtattccggagcccaacggtccggatcctcgatcatcagatgcacgtcgaccggaaggtcagtgacttggcagatgcgagccacaatcggctcacccaacgtcagattcggaacgaaatgatggtccatcacgtccacgtgaacgagatcggcgttggaaatggccttaaggtcacgttccagattgcagaagtcagcggacaggatgctaggtgcgatttgaatagtcatggttctcattctatggaaggtaatcgacttgatgttacttgttgtcggactggtcatcggcatatgagacggatgagccatcgtttgccgtgatttcatccttggttttcgtaaggttggccttcgcggtcgggagaccggtttctccatcctcgacgaggcttagctcaatctcggtgacggtgcgcaacttctcggcaagcagctcggtggactttcccatctgctgaataacgatgaaagccaccacgccaagcacgaacaccgccatggacacccatacgttgatgcgcacgccaaggaactcgtgcgcgaaatcaatgcgcagagcctcgatccaagtgcgtcccgccgtgtaccacatgatgtatatggcgaacaaggacccggccttgagttttttcatgattttggaaccaaggaaaacgatgagcgcagcaccgatgagattccaaatcatctcatacaggaaggtggggtggaacagcgtgcctgtcgggcaggtcgctccgtcatagcattgttcgctgtgaccgatggcgcttccctccatattcaacttcaaaccccaaggcaaggtcgtcggcgcgccgtagagctcttggttgaaccagttgcccagacgtcccacggcctgcgccacgagcaatcctggcgcgacggcgtcaccgagcagagccattggataatgcttgtgacgacaccatgcccaagcggcaagcgctccaagcaggacgccgccccagatgcccagtccgccattccagatgcggaacatctccacccaatcgccggtcggtccgaagaaacgttccggagtggtgatgatgtggtatatacgcgcaccgatgatgccgctcggcaccgcgacaagcgtgatgtcgagaatctgatcgaaattaccgccatatcgtttccaatgaacggttgtcatccataccgccagcacgatgccgagcagaatgcacagcgcgtagaaatggatggtcaccggcccgatggaaaactgcgaaatggtgggtgacggaatgtaagcaagtgtcatagtttcctgatggtagtccacgtatacgatatggtacgtggactaccagtatgttgtctttggactggttcagttgcgggcgttgtggatgccttcggcaagctcctcagtcttctccgccaaggccttgagaccggtggcttcgtcgactgcatgcttgccggattcgtcaagcatggtatgcaccagagccgagcctacgatgacaccgtccgcatacgatccgacacgagccccctgttccgcggtggacacgccgatgcctacgcacacgtttttcgcaccggccttgcgggtacgggcgaccagttccttcggggacgcatcgatggtggagcgttctccggtgacgcccatgcgggcggcagcatagacgaaaccccgcgcattgtccgcaacgactttcagacggtcttcggtggaatccggagataccaggaagatgcggtcgagtccgtgacggtcggaggcttcgatccactcgccggcctcgtccggaatgagatccggggtgatgagaccggctccaccggcgttttcgaaatcacgtgcgaatcgttcgacgccgtaatggaagatgaggttccaatagctcatgaccaatggcactcccccggcgttcgccactgtttccaccgctttgaatacgttggcgattttttcaccattgtcgatggcgatttgcgatgccgcctggatgacgggaccgtccatgacggggtcggaatacggcagcccgatttcgaccgcgttcacgccgtgttcgaccatggtgcggaaagctttgagcgaataatccggatcagggaatccgtatggcagatatccgatgaatgccggcttgtcggcggctttgaattcatcgaacatggtttccgtcgggcttggcttgtggctgatgccgagtggctggccggacggcgtggatgatgttgcgttcgtcatgatggttgctccttttctcactcgccgtccgcgttgttgccttgcgcgccgttggcttccaaggctttggcctgctcgtcggtcaggtatccgaaccatttgccggcggtgttcatgtccttgtctccacggccagagatgttgatgatcatgaccggatgctcataccctttggccttgaggtctgcagctgccttgtacgcgccggccactgcgtgggagctttcgatggcagggatgatgccttcggtttcgcacagatccttgaacgcgctcatggcttcctgatcagtggcccaggaatagttgacgcggccgatatccttgagccatgcatgttcggggccgacggaggcgtaatccaagcctgcggagatggagtacgtgtcaagggtctggccttcggggttttccaacagatagctcttggctccttggaacatgcccagttcaccggtacctggcgcgaatcgaatggcatggcgaccggattcgggcccgttaccgccggcctcgtaaccgtacaggtttactcgttcgtcatcgaggaaggcgttcatgatgccgatggcgttggaaccgccgccgacgcatgcgcagatagcatcgggatggtcgatgccataccaatcctgcagctgctgtttcgcttcctctccgatgatcttttggaagtcgcgcaccatggatgggaacggatgaggccctgcgaccgtgccgagcagataatgggtgtctttgacgttggtgacccagtcgcgcagcgcctcgttgatggcgtccttgaggatgcgatcacccaaggtgacttcgacgacctccgcgccaagcatgcgcatgcgggcaacgttcagcgcctgacggcgggcatcgatctgtcccatgtagatgcggcacttgagtcccagcatggcacagaccgtggcagtggccacaccatgctggcctgcaccggtttcggcgatcacacgggttttgcccatgcgcttgaccagtagggcctgtccaagcgcgttgttgatcttgtgggcgccggtgtggttcaggtcttcacgcttgaggaacacacgggcatcaagaccggttttctcctcgagcctctgcgcgaaacgaggcgcttcagtcaatggggacggacgtccaacatactgctggttcaaccgcgccaattccttatggaattcaggatcggccttggcttccgtatacacgcgttcaagctcgtcgagcgccgtgatcagcgcttccggaacatagcgtccgccaaactgtccgaaatatggtccttcatggcttgccaacggggtctgttcggatgccttcactcttgctcctgcctttactaatcgttccactgcctgctcatggttggccgcggtggccacgccttctcccaccagcaccgcatccgcgccggcacgggcgtaatcctcaagctcaaccgaaccgaacacaccggattccgccacgcgaatcacatcgtccggcaaatccgcggccagttcgttgtacttgttcacatccaccttgaggtctttaagattgcgggcgttgatgccaatgaccttggccccggcattgatggcccgttgaatctcctcacgggtgtgtgtttccaccagcaccgtcatattgaggctatgcgcgagatcgagcagcgacttgagcttgacgtcgtccaatgcggcgacgatgagcagcaccagatcggcaccatgcgcacgtgcttcccaaatctgatattcggtaacgatgaaatccttgcgtagcacgggaatcctcactgcggcgcgcaccttgtcgaaatcttcaagagagccaaggaaccaacggccttcagtcaacacggaaatcgcgcttgcacctccctgctcgtattcgcgggccaaagcggccggatccggaatatcgctcaaatggcctttggatggggaggcacgcttgatctcggcgatgaccggaatgccatccgcctttttcagccactgacgcgcatcgattggcgctgaagcctcgaacgccatccgcttgacctcagcgagcggcacgttgttttctcttgatcgctgatcctcgacggctcccgccaccaattcatcgagcacagacattactgcttcctttcacaacacaattgaacggtcagaatgtgactcacaactggcgaagctgcgcggcgatctgtaccgcttcaacgctggcttcggccttgttgcgagtctcctgccactcactggccggcacggaatcgaggacgattccagctccggcctgcacgctcgcttcatggtcgcgaatgaatgcagttcgaatggcgatggccatatcgaggttgcctgaaaaatcaaaataaccgacggtgccgccgtaaataccacggtcggccggctcaagttcatcgataatctcgatggcgcgcggcttcggcgctccggacagcgtccccgcggggaaggcggaagtgaacacgtcgaacgccgtcatatgcggatcgacctgcccggtaacggttgagcagatgtgcatgatatggctgaaccgtttgatgtccatcaaggaaacgacttcgacgctttccggacggcacacgcggctcagatcgttgcgggccagatcgaccagcatgatatgctcgctgcgttccttcgggtctgccaatagttccttggcgagacgttcatcttcctcaggagtggcgcctcgtggtctggaaccggcaattgggaaagacatggcatggccgttgtccaccttgatcagtgtttccgggctggaaccgatgacgttgaaatcacgtccttgagcatcggtgagtgccatgaaatacatgtacgggctcggattgagggtacgcagcacacgatacacatcaaacggatcggcgggagaatcaatatccagtcgctgcgaaatgaccacttggaacacatcgccatcgatgatatggcgtttggcctcttcaacggaacgttcgtaatcgcttttctccgtgcggaatcgcagttggggctggccgaccgactcgtcgagcacattgacccgggcttcgttttcgacgggtgcggcagccttgcgctgcatatcatccagacgtgccagcgcttcatcgtaggcggcatcggcacgagtcggacggtcatcgacattcacggcattggcaatcagccataccgagccagacacgtggtcgactactgcgatgtccgtggcgagagccagaacggtttccggctgtccggtctcattcggggcttcggcacggagcgtcggttcccaatgtcggatggaatcccatccgacagtaccaacgaggccactggtcagattcggcaatccctcgacgtgcggagccttcaatgtcttcagcgcggcatgtgccacttcgacaacatcaccgtcggtgggcactccgacaggcacctgtcccagccaatcggctttgccgttgttcgaacgcagctgcgccatggaattcacgccgatgaagctgtatctactccacgctccgccaaattcagccgattcgaggatgaacgtaccggaacggcctcctgcgagacgctcgtagaagccgactggggtcaatgaatcagccagcaaacgacgtacgatggggatgacacggtagccttggtcggccaattcatggaactgctcacggcttggccatgtagcaccccacttgagggtctgtacgctgcattcgctcaccgctgaccctcctgttctttggttcgatggcccacgaccacaggcagctgtccgccttcttcaaagcaggaacgtttgccggtatggcaagccgctcccacttggtcaacttctaccagaatggcatctccatcgcaatccagcgcgaaggacttcacatactgggcatgtcccgacgtatcgcccttacgccaatactcctgcctggacctcgaccagaatgtgacgcgtccggtggtgagggtacgtctgatggcttcgtcgttcatatagccgaccatcagtacctctttggtatcgaactgctggatgacggccgcgaccaagcctttgtcatcgtgcttgagacgctgtgcgatgcgcgggtcgagagtggtggtgttgtcgtatgcttcgttggtcatgatggtattgcgattcgttgttcagtactacagggttggtttgcgtagtttccgtggttctattcagcgtacggtgtatccggctgccttgatggcgtctttgacttcaccgatggtgactttgccgtaatggaaaatcgaggcagcgagcacggcatcggcgcccgcctcgattgccggcggaaaatccgaggctttgccggcgccgccagaagcgataatcgggattttgacttccttgcggacagctttgatcatctccagatcgaagccttgttgggtgccatcggcatccattgaattaaggagaatctcccccgcaccaagttcttgggcgcgcttgacccaccaaatggcgtcaatgccagtggatttgcgcccgcccatggtggtgacttcgaaacctgactgcgtatgtcgttctccctgttcgcgacgtgcatcgacggacagcacaagcacctgattgccgaatcgttcggcgacacgactgatgagggtagggtcattgatggccgcggtgttgacgccgaccttatccgcaccgcaacgaagcagggaatcgacgtcttcaggggtacgtacgccgccgccgacagtcagtggaataaaaatctgttcggcggtgcggctcaccacatcgaccatggtctgcctatgggagcttgacgccgtcacatcaaggaacgtcagttcgtccgcgccctggcggtagtattccgcggcgagttcgaccgggtctcctgcatcgcgaagattctcgaaatgcacgcctttgaccactcgtcccgcatcgacatcaagacatggaatgactcggaccgccagtgacatgctgctctactccttcacgcataacggttgcaatgattgcaagagtaaccgcaatacgttacgtcggttcatgcggattccgagtagcggacagaaccgggcctttcggaggaatcagtcacgttctttggctgcaagctgtccgcatgcgccatcaatgtcctgtcctctggtatcacgcagcgtggctgtgatgccagcgttatggagaatctcaaggaatctacgctcgtcttctggtttggacgcggtccacttcgatccctcgatcggattgagcggaatcggattgacatgcgcccaatcatctccatagtggttcagacgcttcgccagcaatttggcatgttccgcctggtcgttgatgccgcgcatcaaggcgtattcgatgctgactcgccgtttggaagccagataataatcatgcgcagcgtcgagcacctgtttggtgttgaaacgcttgttcatgggcacaagttcatcgcgcaattcatcgctcggcgcgtgcagggatactgcgagacgtactgggatgccttcttcggccagtttcctgatgccaggcaccacgccaacggtggaaaccgtgatgttacgtgcggagatgccgaagccttcgggaggcatggaactaatttggcggactgcactcaagacggatttatagttgcccattggttcgcccatgcccatgaacacgatgttgctcagtcgtccggagcctccggccacttcaccgtcacgcatggccttcgtggccacacgaacctgctcaacgatttcacctgcggacatgttcctggtcagtcccagttgtccagtggcgcagaatgggcaacccatgccgcagccgacctggctggaaatgcaaagcgtggttctggtgggataacgcatcaatacggattcgatcagcgacccatcaaacaggcgccacaacgttttgatggtggtgcctccatcggcgacttggcgtgtcacctcatggatgagttccgggaagaaagcttcagccgcgtcggagcgtcttgccgccggaaaatcggaaaattcttccgcattgacatcgaaatggccatagtaatgattagccagctgtttgaccctgaatttcggcaatccaagttccttggccttaccgatacgttcctcttcggacatatcggcgaaatgcagtggcggcttgccacggcgggcatggtctttcgacagcacatcccggaaggcgcccgaagtgcctccaggagtgatgcctgtttccggctgatcattcatggaattcacggttattggccctttctcacattccggtggcccacaggagcacgcacacgaaaggagcgcacaggaggatggagtcgacacgatccatcactccgccatgacctttaagcagatggcccatatccttaataccaatgtcacgcttcagcatggaagcgcataggtcgccgaaggttccggctataccgatcatgaaaccagcgacaataggcacccaccatcgaaccgtccaaacggatggctcgtaagtgcaaaacatcaccacaaaagaaccggccatggcgaacaagatggatcctgccaggccctcccatgatttcttcggtgagatacggggactgagtttatgtttgccaagccatgcacctgcaaacagaccaccggtgtcactcagcgcgggcatgaagacaagcatgatggcatgtgccaccggatgaccgttgaacgtcaacggcatgatcaggcaggaggcaagcagcggaatgtacagaacggtgaacatggagactgccacatggctcagtcggctgtggcgcacttcaccctgttcatgattgaacgacgattcgagacgagcacctgcatcggtgtgcgacagtttgtccgccacggccagggaaagccgactgccgaacgtcaccttggcacttgcggcgatcgctacaagcagcaaggaggccagtacacagaccgtcatagccacaatatgatgcttgctgtagtaggtggccagcaaagtcaccgcggaacatgcccacagcgccaccacgggaatatgcaatcccgcggtggcgaaatcgacgcgcagctcccacaatgcgagcaccatgaacagcacgacaagatagacgaacaaatcaacgctgatcaacaggcatgccaagatgatggcgatcaggacgaccgccgtggcgatggcctgcggcatgttgcgtccggttttcttgttgatggcgttaatggcctcttcggcttctttttcgcgttgctcctgtttttccatcgtggtctctcctgtggtaccgtgcgtcgattgatgattatggagattcgaaggaatcagacctccatgatctccttctgcttggtttccagcagagcgtcaagctcgtcggtggtctgcttggtgaccttgtcgagttccttgagcagacgatcgccttcgtcctcgcccatgtcgccgtctttgatggccttgtcaagggattccttggccttgcgacgaatgttgcgcaccgcgaccttgccgtcttcagccttgcccttggcaatcttgacgtattccttgcgacgctcttcggtcagctccggcatggtcaggcgaatgacgttgccgtcgcgacgggggctggctccgagatcggaatcacgaagcgccttctccacggcgttggcctgggacgcatcgaaaggagtgaccgccaaggtgcgcggctccggaacaccgatggtggcaacggccttcagcggggtcggtgcgccgtaatagtcaacggtgatgccgttaagcagcgccggattcgcacgaccggtgcgaataccggagaagttctccttggtggattccacggacttggccatctgcgccttggcctgatcgacgatagttgccattgtttgctcctttaatattgttggtttaatcgatattcggctttgaatgtcgtcactcggcgagggtggattccgcggtggaaaccatggtgccgatctcctcgcccagcaaagcctgggtcacattgccggcgccctcgagtccgaagacgcggatgcgctgcttgttgtcccgcgccatggaaagcgccgcagcatccatgaccgcaagattgtcgaccaatgcacggttatagctcaacgtggcgaagcgcttggcgttctcgtctttgcgcggatcggcagtgtatacgccgtccacgccgttcttgcccatcagcacctcatcgcagtggatttccagagaacgctggatggacacggtgtcagtggagaaatacggcatgcctgctccggcgccgaaaatcaccacgcgtcccttttccagatgacgaatggccttaagcggaatgtacggctcggcgacctgtcccatggtgatggcggtttgcacgcgcgtggcctgtccctcctgctcgaggaaatcctgcagagcgaggcagttcatcaccgttcccagcatgcccatatagtcgccgcgggaacgatcgatgccggcctgctgcagttcggcgccacggaagaagttgccgccaccaacaacgatggcgacctgcacaccttgcttgaccgcgggaacgatttcctccgcaatacgacgaacgacggtggtgtcgatgccgactttgcctccgccgaatgcctctccggacagcttgagcagtaccctgcggggattgtcgccagtgttttcgccagtcatgaaatgcctttcttacccgaaaacccatgaaatttaccgttttcaagactatcggcaaacacagacaccaaaacacgatggggtttagtgcaaaaaaatgtccgcaatcctgttggattgcggacattggagatatgccaagcccacgttcgaaagcgtgagctcaattcacatcagattcactcggcgtcgcccttgccgacctccacacgagcgaaggaaagcgcggttcccccgacttccttgaacaggtcgccgacggtcttggacggatccttgacgtacgcctgctcaagcagcacggtctccttgtagaatgcgccgagacggccttccacgatcttcggagcgatcttctcgatcacggcctccggcttgcccttgctcttgagctcctccgtggtcttctcggtggccacgcgacgctcggattccagcacatcagccggaacatcctcgcgggtcagccactgggcgcccatcgcggaaatctgcagagcggcctcatgagccacagcagcgccggcttcatcggtggcaatcatggccacgatgctcggcggcatctcagcggacttcttgtgggcgtagacctcgacatgcgggccctcgaccttggcgaactggcctaccttgacgtgctcaccgaacagagcagcggcttcctcgacggcttccttcacggtggtgtcaccggaggctgctgccagaacctcatccacggaggatgcttcggccttgacggcgtcatcgagcacgctgccggcgaattccacgaacttcggggtcttggccacgaagtcggtctcggagttcagctcgaccgcatagccggtctggccgttggcggattcgacaacggtggaggcgatggtgccttcctgagccttgcggccttcacgcttgccagcggcctggatgcccttggcgcggatgatttccttggcgcgagccacatcgccttcggcttcggtcagggccttcttgacgtccatcatgccggcgccggtttcctcgcgcacctgcttgatcagagctgcagtgattgctgccattgatttgtctcctctgaaaatttggtgatgccccgatgatgggaggcatagcacctcccatcatagagcatggtctcactcggccttggtttcgccttcagcctcagccggggcttcagctgccggagcgccctcggtgaggagctccttttcccaagcagccatcggctgctcggcttcgccttcggccttggcggccttgccggaacgctccagcagaccttcggccactgcgtcagccatgaggctggtcagcagttcgatgccgcggatggcgtcatcgttggcggcgatcggatactcaacggattccggatcggcgttggtgtcgacgatggcgacaaccggaatgcccagcttgtgggcttcctcgacggccagagcttccttgttcacatcgaccacgaacatggcggacggggtgcggttcatgttgcggataccgcccagctgcttagccagcttgtccttctcacgctcgaggagcagcagctccttcttggtcagaccggagccgtgcacgtcggtgaagtccatttcctcaagttccttgaggcgggagacgcgcttggacacggtctggaagttggtcagcatgccgccgagccaacgctcggagacatacggcatgttcacgcgggtggcctgagcggaaacagcttcctgagcctgtttcttggtgccgacgaacagcacggtgccgttgtgggcaacagtggccttgatgaagtcgtaggccttgtcgatcatgtcgagcgacttgaacaggttgatgatgtggatgccgttgcgctgggtgaggatgaactgcttcatcttcgggttccaacgacgggtctggtggccgaagtgcaggcctgccttcagcatgtcgctcatagtgatctgagccatggtattgctacctctttctttgtcggttcttgcctggtcatgcgttcctgcgtgcagccaatgccttgcaggcatcagccgaccgacacaggtcgtcgcgagcatgacgcgaattggttgcgcaccggttgacaataattgggcggtttgaagcactcgcggcagcgcttctcaccaaattggcgcacaaatactaaaaataccatggggccacgtctttctgacgtggccccatggttgaatcgtcgttcgctgtttcgatcacttgcgatgggtgcgcatgtaacgcatcgcctcgcggcgttcttccttttccagacgatcaagatagacgtgaccgtccaaatgatcagtctcgtgctgcagcatgcggcccatgatgccatggccttccaacactaccggcttgccgtccagatcaatgccccgcacgcgagcataatcggcgcgacgagtcttgtaccacaatcctggaacggaaaggcagccttcatcgccatattgctctccgctggtctcctccagcaccgggttaagcacatagccgattttgccgtcgatattgtaggaaaacgcacgcagactcacaccgatttggttggcggacaacccggcgcgtcccgggtcatcaacggtatccaacaaatcctgcaccagatggcgcaccgcgggcgtgatctccttgatgggatcgcatggggtgcgcagcactggatcaggtacgactcgaatctcacggattgccaaaattaacgctcctcgttgttcttggttgcggaaggctcgacggacggtgccgtctcgtcatccggttcatcggactgcttcttgattctctcctgcatggtatcaaatgcctgccgaaccttcgggctgacggattcagaagcctgccgcatgctttccgacgcctgcttgacggtttcggtggtgcggtcgagaatctggacggtcttcggcaacggcctgttggagggttttggcgcgtaaatcacgttttcgatgacgtctgcgtagcgctgcagcaccttgggacgaacaactttcaggcttgccgtcaaggtgccgtcctgttggttgaattcctcatcgagaatctcgaattttcgtacggattccgcacgggaaacgttcgcgttggccttttcgacatactgctgcacgaaagcgcgcacggcatcgttttccgctacctgcttcatggacatatcggcatcaagaccctgctgggaaagccaagaacgagtcatatcagaatccagttcaatcaaagcgctgatgaacggcttgccatcgccaatgaccacagcatgggacacgataggacaggtgtcgatgatgtcctccatcggggcggggctgacgttcttgcctccggctgtgatgatgatgtccttcttgcggccggtgatatacacgaatccatcatcgtcgatggcccccagatcgccggtcctcagccaaccatcaggcattttgacttcagcggtcttctcaggattcttgtagtagccaagaaaaacattggggcccatgacctgcagctcgccatcatcatcggtgcgcacacccatacccggcccgggcttaccaacggaaccgacgcgattcgcattttgccagttgacgatcatcggagccgcggtttccgtcataccgtacccctgaatgaacgtgatgccatccatgccattgaagaagtgggcaaggtcgacgttcagcggggcgccgccgcatgccagatatttcaggttcggaccaagcgcggaacgaatggacttgccgacgacggacatgaagaaggaatgctcggctcgggccaccatcgaatgatgtcccccgtcctgctcgtccttggaccattgcacgaaatgatcgaacgccttggcgaagaccctgccgcgaatacccgcaccggccttctgcgaggcagcgttgtacactttttcgaacacacgtggcacgccaagcaaatacgtcggtttgaaactgcgcagatcggcgagcagatgcttggctccaggcagatagccgaccacgccttgtccgccaatcgccacgtattggatatagcgggcgaagcagtgcgccaacggcaggaacagcatcaacctgttgggctggtacagcatctcgtcaagaatgatgtagccattgagcacgatatgcgtgaagttgcgatgggacagcatcgcacccttcggacgtcccgtggagcccgatgtgtaaacgatggtgagcatgtcgtccgccttgatccgggcaatgacctgatcaagggtatcgtcatcgacgccctctccgaaatcggcgactgcgtcaagaccgtccgctttgaaattgaacacgtaacgcagcccttcatgcatgtcacgaatctgttcgagcgtctgcgtgtggacggaatctccagcgaaggcaataaccggctccacctcttccacgatggaagcggcctgcttggccgaatcggtttcataaatcggaacgcttaccgcgccgatggccgcgcatgcgaaatcgaccacaccccactcgtaacaggtgggagagtaaatgaccaccatgcttccggccttgactccaagaccgataaggcccttcgccacggcgcgcacacgagcgagcatctggcctgccgtcacatcatgccattgccgagtctcatcatcctgccattgtgcgataagatcatccggattcttctgcgcacgacgcgacagcaacgcatataccgtgtcatcatccgtggtgctgtaggccggctctggtacaaattctctcaacatggttctctatagtagttcccgtatgcttaaggcacgctgaaaacccttggcatcgactgcgaacatcgacgccaagggcttttgcagattcctaccgtatcatcgcatcaatgcgatcacccgaaatcagccaagacgcacttccacgtggagcctttgagcctgaatgcggtgttgcatctcaaccgcgtttcgccgatgttgagcaaagccgcacattcgaatttcgtggtcgaagtcaaccagccgttaatggcggacacgttgatgggaagcagaccaatcttggcatatagatttgcgtcttccttcatataatggcctattatggaagctgcgattttaagcctacgcatacagtcctccgttagaatacgctctacatgcgccggcttttgccgaccacggaagatgtcgatggcatcgcacgacatgcgcgcgcccaataacgccaaggaataggcttgcttcgcgtcccacggtgtggaatcggaccggataacatggaagggcacccgcatgccggataattgtgtttccaaaaacccatcatatgaaggaagcttctcgacggattttcctatgcactgcagccattggccattgttttccgcttctttaagaccgacatacgaatcagggtctgacggtgggatttcgtcaggctcattgccttctatctccttgtcgtcttccggctcccgctcagagccggactgccattccggaggtgaaacgccatcgtcggataagtcgtccattgccatggatccctcatttctttacctgtttaatgtcatccaactctcttcactgagaaggaccaaaaacattaatacataaagacaatccccccgtcaagtcgacggagggattgtggataactttttttatccacaggacgaagctatctgatcagtggctcgaagcgaccgtaaccggacaacgttggaagctcttcaaatcgacataaccggtcgtggccatggctctgcgaagcgccccaacaaaattggtggttccgtcggcgttatggctcgggccgaacatgacctcctgcaaggaacctacggtgcccacgttagtgcggaatccgcgcggcaacgtctggtggcgggcctcggcgccccaatgcatgcctttgccaggagcctcggaggcgcgtgccagaggcgagcccagcatcaccgcatcggcgcccagcgcgaatgccttgacgaagctgccggaatcacccataccgccgtcggcaatcacctgcacatagcgtccgcccgattcgtccatgtaatcgcggcgggcctcggcgacatcggcgatggctgtggccatcggcgcgtgcactccaatcgtgttgcggttggcggataccgcaccgccaccgaagccgacaagcacgccagcggctcccgtgcgcatcaaatgcaacgcagccgtgtagttggccgcgccgccaacaatgacggggacatccaggtcatagatgaatttcttaaggttcaggggctcatggtccttggagacatgctccgccgacaccacggtgccacgaatgacaaacagatcgacaccggcctcaagcacggtggaataataatcctgcgtacgctgcggagacagcgcgccggctacggtgacgccggcatcacgaatctcatgcagacgttcgacgatgagttccggcttgatcggctcagcgtaaatctgctggatgcgttcggtggccttgtccgcaggcagctgcgcgatttcgtccagcagcggctggggatcgtcatagcgggtccacaatccttctaggtcaagcacgccaagcgcgcccatcttgcccatggcgatggccgtggccgggctggtcacggaatccatcggggcgccgatgaccggcacgtcgaattcataggcgtcgacctgccaagaggtggacacatcctgaggatcacgggtacgacgggagggaacgatggagacatcgtccagcgaataggccagacggcccttcttgcccaaaccgatttcaatttcctgagacatggtttcaaggctaatgctcagctatgacagtgccttcgcgcgtgtccccacggttttggacatttccatacggaattaacacacatgtaataagacggaacccatcaccttcaattccgacagggaggacaaaccatggccaaaatcaaggtcgaaggcaaagtcgtcgaactcgacggcgacgagatgacccgtgtcatctggaaagacatcaagaaccgtctgatcctgccgtacctcgacgtggatttggattattacgatctgggcatcgaaaaccgcgacgccaccgacgatcaggtgaccgtcgacgcggcgaaggccatccagcgcgaacatgtcggcgtcaaatgcgccaccatcaccccggacgaggcgcgcgtcaaggagttcggcctcaagaagatgtggaagtcccccaatggtaccatccgcaacattctcggcggcaccatcttccgcgagccgatcgtcatgagcaatgtgcctcgcctggtctcgggatggaccaagccgatcgtcgtggcacgtcacgccttcggagaccagtacaaagccactgatttcaaggttccgggagccggcaccctcaccgtaaccttcactccggaagacggctccgagccgattgagcacgtcgtttacaattatggccctgacggcggagttgcccaggtgcaatacaacgtgaacgattccatccgaggtttcgcacgcgcctgcttcaactatggtctgatgcgcggctatccggtgtacctgtccaccaagaacacgattctcaaggcgtacgacggccagttcaaggatacgttcgccgaggtgttcgaaaacgaatacaaggacaaatacgaggcggctggcctgacctacgagcaccgactcattgatgacatggtggcaagctccctcaagtggcatggcggctatatctgggcttgcaagaactatgatggcgacgtgcagtcggattccgtcgcacagggattcggctcccttggcctaatgacctccgtgctgatgactcccgacgggcagaccgtcgaagccgaagccgcgcacggcaccgtgacccgccattatcgccgttggcagaagggtgaaaagacctcgaccaatccgatcgcctccatcttcgcatggaccggaggtctgaagcatcgcgccgaccttgacaacactccggaagtcaagcatttcgccgaaactttggagaaagtcatcatcgccaccgtcgaaggcggacagatgaccaaggatctggccatgctcatcggaccggaccagccttggctcgataccgagggtttcatgaacgccctcgacgagaatctggcaaaggctctggcagagtaatctatctgagctgtcgaaagcccgtatgcgcaatcacacacgcgtacgggctttttgacgtccggatattacaatcgatggtcagtataaggaacgtctattcttcagcaaaggacatggcatgattctgcatcgcacaatcccggcgaaacgtctgctcgctctgctggcatcggtctgcatggcaacagccatgggggcctgctcgcccaacggtgattcgcaatcgcagcaacagccgtcatcacaatccagcgcaacagccgatgccggcaatgtggcgattttcgctccgacagacagcatcaccatctctcaacagacgccattgagcaaatgggaaaaactcgttcccgaaatcgtgtcctcgttgaaacggaccggtgtcaaaagcggcgacatcaccgtgaaaaccgcttcgaacctcgacaaacaaagtcaaagcgtccaagactatgtggtgaatcacatcaacggaaccgagcattcgtccacgaaagccaaaaccaccttggtggtggcgcctgtcgccgagatgccggaatccgacaggcaatacggcgactatgcgcggcatgatatcacgtggaactccgacgcgtcggatgaggacgaacaggattatgcgcaatcagcgcaacggctggtttcggcgttgcagcttgcgcagaatgaaggaatgaaggtcgttctgatctccaatacgcttcaagggcatgcgccggacgtatatgtgccgatgaccacggccgagcagattggagaactgcaagccaaagagctcgtcaacaagctcgagctcgacaaggcatcgtccgatgcccccaagcaaatcgaggtactactcccctacgacgcggccgacggacatgatgccaaaacggacacgtccttcgcccagaacatgttcaaaggcatctggaaagtgctcgaaccgtatttcaaggacggcaaagcggcatctccttccgagacgctcaccgcttcgaccaccaaggatgactggcggtccgtggcattcgattcgtcaaaagccgaacaaatcaaatcggtgcttgccgaacgtctcgacgcggacaaggacgattcgcaccctgtccaccttgatggcgtcatctcctgcaacgactatgtggcgaagaacatcgccgacgagttggacaaactcggctacacaggttcctcagccgatatcaacccttccatctcaatttccggcatcgtggacagcatcacgggcaaaaaagacctgaaacggcaggcagtgcctgaccctgcgaagacgtcgtcatcggatgacgacagcgattccgataacaaggaaaacgcaaaatggccgatcatcaccggctatggggcctatatcagttccatgccgaacatcgtcaacggcaagcaatggatgaccgccatggagaaccgcaaggcgttggccgatgacatcgcgcagacatgcgtgcgactgaacacttcgggcaaactttccaaactcggtttcatccgttccgcaacggtcgaggggaagaaaattacgaccatccatgaggagacattggcgatcagcgccgacaatctcaagaaaacgctgattgaacccggctacatttcgctggcggatgcgggcctatgattcttccgggattcttccggatatggtgggggccgatggcatcactcggatgtcaccggcccccaccatatttcgaacatcattcggcgtgagcctccggcttcctcggcacgtagatgaccttgtcgatcaacgtccggtaatgttcaaccactgcctgcctgcgggccttcatgctcggcgtgaccaaaccgttctcctcagtgaactcgtcgggaacgatttcgaacttgcggattgattcggcacgtgaggcgagctcattggctttgttgacggcacgctccacttccgcacgcacaatggggttcttcgaggcttcatccaaatcagcgacctgttccgctcccttggattccagccataggttcgtctccgccaaatcaagggagatgattgcggcgatgaatggcttgcgatcgccgatcatgacgcattggctcaccaccggcgaagtcatgatggatgcttccatctcgcatggggagacgttcttgccgcctgcggtgatgatgagatccttcttacgcccgacgatggaaacgaagccgtcatcatcaatggagccgagatcaccggtatgcagccatccatcgacaatttgctgcttggtaacgtcaggattgttgtggtatccggcgcatacggcagggctctttatgcacagctccccttcttcgtcgacccccatggtcacgccttgcagaggcaagccgatggtgccgatcttgtagccttcggtcggattgacgctcgagggggcgcacgtttcggtcatgccgtagccttccaatagcgacagaccgacaccgttgaagaaatgcgcgatagaggaatcaagcggcgctccgccggagaccgcatactcgacgtggccgccgaacacttccatgattgacgaatacaccagcttgttgtacagggcatgttttgcgttcagcgcgagtggaatgctcccaccggactgctgagcatgcgaccaatcgcatgccgtctgggtggcgtcagcgaaaacacgtcccttgaaaccggctccggccttctgcgaggccgcattgtagatcttttcgaaaatccgcggcacggcgaggatgaacgtcggtttgaacgccttgaaatcggcgagaatggtcttcagattgctggacagaccgagtgaaacgtttccggcaaagcagaagaactgcatgtatcgggcgaatacatgggcgagcggcaggaacagcagcagtcgacgattcggtttcatggcgatgtccggcatggagttgacgccggaataggtgatgaacacgaaattggcatgcgtcagttcaacgcccttcggggtgccagtggatcccgacgtatatacgatggtggctagatcggagcctttgaccgcttgttcacgttcaaggaattcggcgtcggagaccgcgcggccgtattcgatgatcgtgtcaattgcaccaagtccgatgacgtacacgtcgccaagatccgggcactgatcacggacggattcgattttgtcgcgctggaaatcatcctcagcgaacgccatcttgacattggcatcattgaaaatcatcttcacctgcgccggcgaattcgtttcatagaccggaacggtaagggcgccgatggacatgatggccacatcaagcgcggtccactgccagcaggtatgcgcgataatggataccgaatctccaggcattacgccacgagcgataagtcctttggcgagggcgacgaccttgtttttgaactccgcagcggtgaacgccgcccattcgccctgagcgttcttgtattcgacaagattgtcgtcaggagtgcgttccacacgctcctcaagtactgagaagatgtttttgtccgagtcaattccctgttccaaagggcgcgtgtattccttgatcataagcttctcgctcctcgaaatctaatgtacagacagcatcatagccggaataccgcactttttctttaaggccacgaccccaggacaacgacaacacccgtggatatggccgttacaacggtttcagttcaacccgcatcgacctcactctgcccgacggatccgcataatcacgtcctccgctcttgaggccccaatgcaggcatccatcggcgcaatgttccgagccaccttcaacacgagcgaaacgctcccccttggcgatgacagccccgaccggtcgcgtagtgaccgcgggttcaaacgtcgacgtcaggcttcccgtttccgcaccgtggcgaagcgttaccacggatttgcccgccactttgccactgaaggcgaccacaccatccgcgggcgcgatgatggcgtcttgcggccatgcacgcaaatccaaaccgcgatgcccaggcaaccattgtttagccggcgcatcatattcgccgattacttgcgcgtgctccaaaggccactgcattgatgtgcggcatgccgcttgtgcgacttcatgcgccacgtcatcagccgattgcgcgtatgccgacgccgtaggttgcgcgcagcatatcgtgaacgcgatattcgccaatacgcatacggccatcgccgcggcgcaccggtgccggttgcgcttgtcaatgtcatcggacatcttattgtgtcgaacacgacgacggtattcccatttgttcatgaggcctcctgtggtccgcgtctctatcggggaatcgatatcatggcacgttcgaagaccgcccgtcgacttggaacgaccttgtggtcggagaacaacacttatccacagatgccgggcgtgtcgcgccatgacatgccaaaacgccaccgaacgtggcatacgatgggacgcatgagtgacaacactacgcaacgcaaggcattgcagcagttggagagcgagccgtccgaggaacgcatcgcctactaccgcaagccattcatggtgctatgggccgccattcaggaggcttcaagcgagctgcaggacgattacacgctttcacccgaattgtcccagttatgggttggcgagcaaatacggcaggtttcggattcgctagtggatcggctcgcggaaatcgccgtggcgcatggcgagtcaaaatcgaatgtggcacgtgcggccaacgcaagtcccgacaacgtcatacgtcgcttccctcgactcaaggctgatgcggcacgcgaccgcacactcattgacgacgtgctcgattcgttggaatagcagcgaaaagttcttacggaaacaaaaaagcccttggaaaaccaagggctaaaaagctcctgcgactgggcttgaaccagtgaccgttcgattaacagtcgaatgctctgccaactgagctacgcaggaatatgttccggagtacccgaaactgcgctcctgcgactgggcttgaaccagtgaccgtccgattaacagtcggatgctctgccaactgagctacgcaggaatgcgctgtgcacaagacatgaatcatacgcggtaaaacgcaaaatgcaaatcccgcgcgtgtctcccctgctgcggcgggactaccgtcacatgctgatcttcgtcaacggcatggcggaatcgattgcgaaatccggttcggacggtttcacgccgctctccaccaggttcacgcccagcatggccaccatagcgccattatcggtgcacagtttgatttgcgggatacgcacttcgacgccatgcttggctccgacctccaacagtttggcgcgcagttgggagttcgcggagaagccgccgccaacgatcagggtcttcgaaccgtactgctcgcaaccgcgcatcgccttcttggcgagcaccgtcgcgacggaatcggccagcgacgcgcacacgtcgtcgatgggaatctcattgccttccgcctgctgctgttcgatccaacgcgccacggccgtcttcacgccggagaaactgaaatcgtacggatgctgctgccccgccttgccttgtgtaaggccctgaggcactttgatggcatgtgggttgcccagctgcgcgtgacggtcgatgtgcgggccgccgggatacgggaaaccaagcagacgcgccaccttgtcgaagcattcgccggcagcgtcgtcgagcgtggtgccgaccacgtcgatatgccgcgccacgtcttcgacatgcagcagcgaagtgtgcccgcccgacacaatcaacgcaagcgtgtccttggggaacggtccgaactgcagctgcgtcaccgcgatatgtccgatgacgtggttgatgccgtagatcggcttgttcgcggcccatgccaacgatttcgcgccggacacgccgaccgcgagacagccggcgaggccgggtcccgcggatacggcgatcgcgtcgacgtcggacagcgtcatgttcgcgtcggccagggctttggagacgcatggcacgaacgcttcggcgtgcgcgcgagaggcgatttcgggaatcacgccgccgtagcgggcgtgttcgtccatggaggacgcgaccacgttggaaatgagggtgcgtccctgcaccacggccgccgccgtttcgtcacaggtcgattcgatgccgagtacgattggttcgctcattgctgctccgttgtgtgtgttgctgaagtgtgctctgtatccgctgttgcgctgaagccgacgacgcgcggctccaagtcgaggctcatggtgtacgcgtcgatgccttctggctggtagtagcgtttgcgcaatcccatccgcgtgaagccgaacctttcgtacaacgccaatgccggcacgttgtcgacgcggacttccagaagcatgcgtttggcgccctgccgacgcgccgagacgatcagtgtttcgagaagcgccgccgctatcccctgccgttggtatggtctgccgacgccgatcgtcatgatctccgcgtcgtcgccgtcgtaccagtagcctgcgtagcctcggacgacgggatccgccgtctgtacggcatcgccttcaatgtcgagcagatacgtgcgtgccggagcgtggaattcctgccgtacggactgttcgctccacgcgccgcggccgaacaggtccttttccaatgcggcgatctgtccgacggcggtgtcttccggaatctgggaatggtcgacaatcatgggcgtgccgtcactccgttcgttcggcgccggcatggttgagcacatgcttgagcgggttgggcactgacacgtccggacgacgcagatataacggttcgacgggggtcggttctgccaacgcctgttcgctggtggtgaaggccgcgaatcgcgccaatccttccgcgccttcgtcgagcagagcatggtcgtcgacttcgccgagggaggcaatcgcattccacgactgcgcgtatttgaccgcaccatggccgatgacgtcgacgacgtacggcttgcccgtgtcggcgagcttcgtaagaacgtcattgacgcgcatcgtgatggaatccggatagtcgatgtccatgtcgatcaacgttatgggcgattgtccgacgccgtccgcaacggtgccgccgtcatacagcgcgaaatacagttgccggcgacgcgcgtcgttgacggcaagcgtcagatggcggcgatcgtccgtagcttgagtatgtgccaggcattgcggcgcgagcacgtcctgtccgaccagttgcgcgcctgtggcgaaggccaatgccttggccgcgacgatgccggcgcgcaggccggtgaatggcgccggtccgacgccgacgacgatgcgggtgatgtccgacgcctgcagtccggcctgttcgacggcttgcgcgatgttcacctgcagtttctcgacatgggtgcgcgaatccgtttcgacgatgggttcatgtccgaccacgcctacggtcgaaccatatgaggtgtcaatcaccagtgtctgcatatgcttgaaaactccttgtgccaaactgccaaccactgtacaaccggcgctggaagccacggcatgcggtgcggtcggccacgtcggatgcgtcttgacagggtcagcgttttcccgcggtgaaatcgaacgaatcccaggcagcgcccaccggcaccaacgtcaccgtgcgtgcgcccgcgctggtcagctcgccgtccgcgtccacggcgggcgcgtcaagcggacggtcgatgtggatttcaagccgttccggagccaatgcggcggccatctgctcgccccattccatcaggatgacggtatgctcgcccggatcctccaattcctcgtccaagccgagcgattccaattcgtccaatagccgtccgaccgtgtcctgtccgggcgcgtaggcgttgccgccgagcctgtaggcgtcgacgtgcaccagatgcgccggcgaaccgtccgcgaaccgtccctcaagctcgcgtgcgatggtgaaggtcggcgagacgatgggctctccgatgccaagtcccgcgccgaacccttgcgcgaacgtggtcttgccggcgccaagcggaccggacagcaacagcacgtcgcctccacgggcaagcttcgccaaacgctcccccaacgcctgcatgtcctcgccggtggcggctgtgatggtaatggtgttgctcatgcggcacgtcctttgcggctgatcagttcgatggaccgttccaaagcatagaccgggtccgagccattggttttgctttgctcgtcggcccatgcgagcatctggatgcatgcgctcatgccgcttgacgtccatccggacagttgccgggtcgcgttcttcaacacccaggggttcgttttcgcctcggccgtggaaatggtgcccgcacgcaccgccgacgccttcgccatcgtccgcagcttcatggccagcgcgccgataagcgcgatcggagcggtgccctgttccacggacgatcgcatggcgatgatcgcgtccgccgtacgtcccgacaacgcgaggtcggcgacacggaagccatccacctgcggattggaggtgagatattggttgacgcgggcgagcgtcatgggattgtcgtcgaaatcgaagcataactggccgaccatggccgcaagctcgccggtcctatcccccaacacggccacgagttgctgcgcggccatcggctcgacgcggcgtttgcgccgttcgaagcattgcatgacgaagttgagtttggcctcgggcttcttcaggtcggcgacagcgtccttgtacgctccggccttggtgagctgctccaccagacgtttgcccttcacaccgccctcatgctggcagatgacgatgcacgcgtccgccggctccttgcacgcctgtctgcagtaagagaccatggcgtcgcccagtttttcgtccgcgttctgcaggttggtgacgatgacgatggcgcgatccgcaagcaatgatgggcttaccgcctcgtcgaaggcgtaatggtcggcgtttgccgcgtcgagttcgatggtttccgcgtcgggataccggcgttgcgcctcgtgtttgaggtcgcgcaccgtctggtcgttcaggtacgagtcgcctccgtacacgaggtggaagggcgtggtggctgcggatggtttcggcataccattcaatctcgctgtatcggtggacaaaaccggcatggcctattcctcccattgcagttcgcgcaatgccttccgagtacgttccatccacatgcgcagccgttccacagggttggctatcagacgttttccgggcagatcgggttcctggaccatcatgcgtccgaacagccggtgcgtcatgatcgcggcggccgcgcaggcggcttccaccacgcagacgaggaccgctccctcgacgcctccggcccacggtatcgtggcctggctgccggaacccagttcaagggcggtcagttccatgaccgcggtgccccaggaggccgcacgggccagttgcaggccgagccacggaatcagccatgagacggcaagactggccaggccggccaatgtggcgaaacccacgaacggcgccaccatcagattcgccggtatggagaacaccggcagttccggttcgatgagcacctggatcggcagggtgaacacttgcgccgctatggtcatggacagagcctcggccacgaaccgtggcaggaccggttccatccatgcgttgagggtgtcggcgaacagcacgatgccgagcaccgcggcgcaggacagggcgaatccgaagctttgcgacatgtgcgggcatgccatcagcatagccaatgtggtccagctcaacgacgccatcgcctggcctcgtctgccgatgaacaggcatgccgcgccggacaatcccatcaaaagcgcgcgggataccgaatccgacggaaacacgcatgccgacagcatgatgtacgacatggcgaccagcagtgcggtgaatcgtcgcggcagaaggaagaacgagcagacggaacgcaccaatgcggcggtcacggccagatggccgccgctgaccgccatgagatgcacgattccggacctttggaacgcgtcctccacctgtgcggcgtatgtggaatcgatgtcggtgccatcgccctcggccggcacgtagtcctgtccgagaacacccaatgtcagtccggggacgagcactttcccttggtcggaaagacgtgcggtttggacgaagaacgcctcctgcatcatgccgatggcgcgcatcggcaggtttggcggcctgacgtgttcgactgtcgtgacgtcggtcagccacaacggcatggcaccgtatcgcgcttcggagatgcgacccgcgatcttgtaggtgccgtcctgtttgagtttgccgcattcaggccggtccgcgtatatacgcgctcgtgccgaactggtttgccgtacgccgtcgatggtgaccgatgtgatgcgcgcgtcggcacggcagtcgttcgaccgtctgtcggagatgacggtcggcgaggtggcgcgcgccgtgacgacgacggaagcgtcgccttccgcggccgcccgagaagccgggtcgcgccattgcagcaaatcataggtcaacgcgcttgccgcgcaaaccatcgcagcgatcgcgcagaccgtgacgctcgcatgccagagcgttatccgtcgtcgaacggacgccggcaatcgtgggaagggcagtcccgccaggaccgccagcggtatcatgcaggtgagaacggccggcaaagcgccgagcatgccgtcatgcgacatgcaatatgcgaagccggcgtgcgcggccagactggccgtccaaccgcatattgcggccggcagcagtctccagtctcggctcccgcgctccctggtcagccaatcgcgtgtgcccgtcatctcacgcacacttggtcgcggaacttcgccagagtcttcgaaccgatgcccttgacttccaaaagctggtcgacgttgtcgaaccgtcctatctgcgttcgatagtcgaggatgcgctgcgcggtgaccggtccgacgcctttgagggtctgcaattcgcctaggtctgcggtgttgaggtcaagctggttcgattgctgcgctccgtcttgcccgtcatggctgtccggtgtggacgcgtcctgcgtcggcccgttttcttgcggtgccggcgtttgttccgtttgcggggcctgttgcggctgctgttgggcctgtgagcgtatctgcgaccgcgaatgctgcagttcgctgtagtggatcgtctgttggacgagcatggtcaggctcgcgcacagcgcgcacgacaaagtgaggatcgccatgagcgcgtggaacgggcggaacgccaatcgtggcctgtcgcgtttcggccgctccccctcgtcgggtttgtccgtcggccggacgccggcgagctccgccaatgtcggtttcgcgtcatgcgtcttccgctgcggcatcggtcgtgcgggttcgtgtgatgcggacggttcgtccgattgcgcctccatggccgtaaggctgttggttcgggacggtttttcgggcatgcccaatccccgcagccgcttcgtggcggccggcatgccagtgccgccgtccgccgtgtggatggcacggatggggtgagtgccgcgaaatgcaaatatgcccatgcatccaacattggaggatgcatgggcatactgtccagccgaaacggctcctgtggtcggagaacgcgggttatccacattcctggcgtgtcgccatggtgcggaagaacccgcgtcctcttatgcgggccgtctcgtcagaagatcattccgcgggaacgatggagacgatcttcggagccttgacgatgaccttgcgtggctccttgccgcccagtcggtcggcgacggcttcgagcgccatcttctccagctccttcggatcgatgtccggggagacctcgagcttggcgcgcaccttgcccttgatctgcacgaccgcggtgacggaatcctgtccgacgtaacgttcgtcggccttcggccagtcggcgtgcgccagggattcggtgtggccgagcttgctccacagttcctcgcagatgtgcggggcgatcggagagagcatcaggatcagcggttcgacggcggcgcgcggcacggcgtcgaggctggtcagatggttgttgagcacgatgagcttggcgatggccgtgttcggacgcatggcctccatctcgacggtcacgtcggcgatcgtgttgttaagcagcttcagcgtcttcgtgtcaagctcgccgtcggtgacgcgcacctcgccggtggtctcgtcgatgacgttacgccacaggcgctgcaggaaacgcatggagccgaccacgttgcgggtgttccatggacgggattcggccagcgggcccatgcccatctcgtacaggcggaaggtgtccgcgccgtagttctcatacatgtcgtcaggcgtgatgatgttcttcaggctcttgcccatcttgccgaactcgcggttggcatgctggccgttccatgtgaacgtcggctcgccgttggcgtcggcgggaccttccaccacttcggcggccggcacgtactggccgcggtcgtcggtgtaggcgtatgcctggatcatgccctggttgaacagcttgtggaacggttccatggagtcgacgtagccgaggtcgaacagcaccttgtgccagaagcgggagtacagcaggtgcagcacggcgtgttcgacgccgccgatgtacaggtccacgccgccggacttgccggcggtcttgttgtggtccggacccatccagtagtcgaactcgtccttctccaccatgtgcttggtgtcggtcgggtcgaggtaacgcatgtagtaccagcaggagccggcccagttcggcatggtgttggtgtcgcggtagtaggtcttcttgccgtcgcccaggtcgagctcgaccttgacccagtcctcgttacggctcagcggagcctccgggttggattcggcgtcctccgggtcgaaggtcttcggactgtagtccggcacgtccggcaggttgatcggcagctgctcgtcgggaagcaggtgcggggtgccgtcctcgccgtagacgatcgggaacggctcgccccagtagcgctggcggctgaacagccagtcgcgtagacggtagctgacggtgcccttgccgacgccggcggattcgagccaggcgttgaccttgtcgatggcctcgtccacgcgcaggccgtcgaggcttagggaatcgcccttggccttggtcgcgtcgatggaggagttgatgacgatgccgtcatgggagacgaacggcgccttgccctcatagttggcgaggtcgtcgccggattccggcagcggcttgacggtgtagatgaccggcaggccgaacttgacggcgaaatcgtaatcgcgctgatcgccgcccggcactgccatgatcgcgccggtgccgtagtccatgagcacgtagtcggcggtgaacagcggcagcttagcgccggtgatcgggttgatggcgtacaggccggtgaacaggccggtcttctcgcccgcctcgtccacgcggtccttggcggtcttggcttcggcggccagacggtacgccttcacggcctcgaccggggtggcgtagccgcccttccaatcctcgggggtttccgccggccattcttccggaacgttctcaagcaggtggtgttccggggagacgactgcgaaggtggtgccgaagagggtgtcgggacgggtggtgtagatctccatgtccttgacgccgttcggggtctcgacgtcgaaatgcacggaagcgccgtgggattcgccgatccagttgcgctgcatgagcttgaccttctcaggccagtcgatggtgtcgaggtcttcgatcagacggtggccgtatgcggtgatgcgcatggaccactggcgcagttcgcgctggaacaccgggaagttgccgcgttcggacttgccttcggcggtgacctcctcgttggcgagcacggtgcccaggcccgggcaccagttgaccggggacttggagatgtaggccagacggaagtcgttgagcacgtcggcctgctcggcttcgctcaggtcggcccaggccttgccttcgaagcccgggatggcgcgcttgccggattcgaactgttcgacgagcgtgctgatcgggcgggcgcagcccttggagccggacgggttagtggcgtcctcgtcgtaccaggcgtcgtagatgcgggagaagatccactgggtccaacgcacgtagccggggtcgatggtggcgaaggaacgacggttgtcgaagctcaggcccatgcggtgcagctggcggcgcatgttggcgatgttttgttcggtggtgatgcgcggatgctggccggtctgcacggcgtactgctcggccggcaggccgaaggcgtcgtagcccatggcgtgcagcacgttctcgcccttcatgcggtggtagcggctgaccacgtcggtggcgaggtagcccagcgggtggccgacgtgcaggcccttgccggacgggtacgggaacatgtccatcgcgaagtaggacgggcggccttcggcgttatggcccttgccgtccttcaggtcgccgttgacgttggcagcccagaaggtgccttcgtcatcccagatcttctgccatttctcttcgatgccctgcgccagcttcgcgttgtagcggaacgacggttcggcggattcgttcggttgcgcctgcgcgcttttctcagtgtcactcataatgcatgaaattagccgcgcaactggacacttcgcaaggaatcaaccactattcaggcacgtgcgccgccgttatttttccgatgccgcggacgcgccggaggacggggccttggccgttgccttcggcggattcatggacgcgtcgggcgtgtatccgatcgacttgcccatgtcggccgcggccttctgccacgagccgtccttgaccatggcgcgcaatgcggcgtcgatttgcccgaccagctcgtcctgtcctgatttgacggcgatgccgtaggaccaggtggtgtcgggaacgtcgacgatcttcagatggtcgcctgtgttgttcgacgccagtccggccgagatcgcgtcgtcggcggcgacggcgtcggcctcgccgatcatcagcgccgtcatgcattgcggatacgtgtcgcgttccgccaccgtcgtgcgggtgtttttcgtgcggctgcggatgttgtcgtacgccgcgcttccagcgaccgcgcatacggttttatcggacaggctgtcggtcccggtgatttcggatgcgctgtcggagcggatgagcagcgcctcccggaccgtcagatatggtccggcgacgtcggcctcaccatcgtgggtcgcgtccatggagaaggaatccacgaccatgtccaccgtgccgtcggtgagcgcggaggctcgcatggccggggacagctgtttgaacacgatctgcttttccgcgtatccgagggttttcgccacgtatttggccacgtcgatgtcgaaaccggagtattcgcctccatgcaggtatccaagccccggctggtcggcggccactcctatcgcgatcgtcggcccctgcgccgcgccttcggtcaccacggaaaccgatgtgccgcacgcgccggcgccggccgcaagtaatgccgcgcatgccgccgcggccacgtatcgcgcttttcccatcatggacgtcacttgaacatgcgcgaccgggtgaggaaccaggtgacgatcgccgaaaggaccagtgagatgccgatgatcaccgcgaagccccatggcttgtccgtgaggggcatgccgagcatgccttcctggaagttcatgccgtacatggagaagatcagggtcggaatcgacagggtgatggagatgatggtgaagatgcgcatcacgttgttcaggttgttcgacacgatcgatgcgaacgcgtcggtcatgttggcgagaacgccgctgtagatgttggccatctcgattgcctgcttgttttccgtgatgacgtcgtcgagcaggtcctcgtcctccggatactgcttgagccgcggcagcgtggtcagcttctccatgacgatttcgttcgatttgagagatgtggtgaagtagaccaatgtcttgctcagttccagcagcataaggatctctcggttttgcatggagtggcgcagcttcagttcgagcttgtcgctttcgcggtcgatgatgcgcaggtaacgcaggtacatggtggcgttgcggtacaggatctgcaggatgaaccgggtcttcatgtatgtgttgaagccgcggatggtgccttccatgaacgggtgcagcacgggcgtgtcctgcatgcagacggtgatgatggcggactgggtgatgatgatcgacaacgggatggtctcgtaccagtcgcggccgccgcgttcctccacggtaggaatgtccacgatgatcatcgtgtagtcgtcctcgacgtcgacgcgcgagcgttcctcgtcatccagaggggcgcgcaggtcggccaggtcgatgccggtttccatggacacgttggcgagctccacgtcggtgggcgccgagagacataaccaggagccgttctccggtttttggatttgctccacctggccgttaatcgttctgaacattctcaacatgtctctcacccgcctttcgcgctttccaacgttctatcgctgtacggaagcccgatccgcatgcggaacgatcgccggattcccggctcgccgcatggtcgggcaaacaacctcattaaggatagtcccaccgtgagaatttgccgtacggacggcggtgatttcatcaagagttcactttggatgatgttttcggcgccgtgtattggatgcttattggatgatcggcttccacagcggcatgccgggcgcgcgcaacgattcgggaccgttctcccagtcggcgaatgatgcgatggcggggccttggttgaattcctcaagcttccaagtgggacggtccgcgttcctggggtcggtgtgcggggtcatgcgcgtccagaaggcgttgcgcatcgcgccgacgttgttgagatcgtcggggtccatgtcgagcagcaccgccacggtggccacgatccatgagccgtggccgacgagaagcaatgtggtaggcattgtctcgtcatggtgtttggcgacgatgtcgcgcacggcttccgcgccgcgtcggcccgtatggatgcggctttccacgccatgcttggtttcgcctcccgtgtgggcgcgccaggaatggtagtcgtcggcgtaatgctcgcagatctcctcgcgggtcatgccctcccattcgccgaagctgcgttcgcgcagacgcgggtcgagttccacgtccagccccatgaggtcggcgaaggcgtgcgcggtctgctgcgcgcggaacagatccgacgagacgacgagcatgcggcgggccgcggcgggcgcgttgttgatttcgtcgacgtcggccagatgggcgttgccgtatgcgggttgcgcgagctggtcgttatgttcggcgagatgcgcgactttcgcccaatagtaggttttggcgagttcgtacgcgctttggtccgcctgccaccgtccgacgatgtcgaggggaatgtcgatttgtccttgcagccgtctggcgagattgtatgcggtgcgtccgtggcgcaggaacagtacttcgtcgatcatggttctcgctttcttggttttcgcatccgatccgcggattgcccggaagccgacgggaaacggtaaagaaaaaggctcccgaatctctccggaagccttccaatcgtggagctaaggggattcgaacccctgaccctctccatgccatggagatgcgctaccagctgcgccatagccccaatgtctgctctgcaaaccttgtataagatacaacacagagcagaatcatgcaattcgcggcgtgtcgggcacgtggtcgaggaaagccccagacacatgcctcataggctatttcgaagtgtccgtcccattgcctgacgtgccggatgacgtgccattggaattcgaaccgttcggcgtcggattctggttcgtggatgccgaaccattcggcgtggtggtcgtccccgtacccgactgtcccgaattgttggtgcctgacgtcgatccgtcggatggcgtagtggagtccgtggacgaatccgtcttgttcgaatcgtctccggtgttggtggacgagtccgagccgtcggtggacgttccggtgccgccggttgtggaatccgtcttcttcccggtgtccttgccgttgttcctgtcggagttcgtggtggaatccttatcggtgtccgtcgtgccggactggttctgcatattgtcctgcgtgccgttgtttccgctgccgtaggtggaatcgccggcattgtcatccgacggcgtctgcttgctgttgaccatgtcacgcaccacggtatcggttccatgtccgcccgtgaacgcgaggatcagtccggcgctcacggccacgccgataagcgcgctgacgatcgcgatgacgatcggcgcacgcttgccatgcagccaagcgtcaaacgacgcccggcgtccagcatgctggatacttccgccggcattgtccggaagcatgttcgattcgcgtcctccggcctgcgcggaggagatgacacggcctgacgttgcgggcatcgccgcggtcgtatccccgtccacggacgtcataaccgtggtctcatcggattcctccgcggacagcgtcttggtctgctcgccctcggattcggcgggagcgatcaccgtggtggcgtcatcgccgctcttgccggcaccgtccgtaccgtccttgtcgttggtcacgaacggtacggcgttttgcagcttctcccccgacgccttgagcacgttcttgtacacctgcgtcgcaacggccgagacgatggaaccggcggcgacgccaatcaccgatcccgcgatgccgatttttgcggacagcaggaacgaggtcaccgcggcaagcgcgcccgcgaaaatcgatgaaaacgatatgcccttgaaaaaattctttacagagcatgacggtagccgattacgctttgaaaaaacttgcgattctgtgaaaagcttggaaaaaacttgggaacgggacgcgcgtcatcccccgttttcgtcggcggctatagctgcggatgctcccactgctcggtgtcggcgatcgccggaccatggttgtagtcgaccagacgccaccgcagcgcgccctgcagttccaacggcgccagccgcacccaatgcgcgttgcgcatcgacagaatgtcggcgaaatcgccatgcacttcgctcaatcccagcagcgtctgcaacgtctgcgagatccaagcgccatgcgagaacacgtacaggtcggtatcggagccggccttcgacgcccaatcgttcaacgcctcgacgccacgcctgccgacgttctgcttcggttctgcgccatacttgagctcgccgccgcggaactgggcccatgacagataatcctcggggaaccgtttggcgagctcttcgacggcgatgccttcccaatcgccgaagctgcgttcgcgcacacggacgtcgggatgcacgtcgagtccgagcgggtcggcgaacgcgtgggcggtggcggccgcgcgtttgagatcggagcagacgaccagctggcatgccgcttcgggatgacggtccacgtacagttcacgcaatgcggacgcggtctggcgtacctgccacatgcccacttcgtcgagcggaatgtcgatctgtccctgcagcctgtgctgcgcgttgtatgcggtgcgtccgtggcgcaccagtgtgatggaacgcacgtgtggcgtcatggtctcatcatggtcgagttcgacgtttctgggcatgcctctcacctatctaccggttgtctttccgatttattgcctgtctgccgtcgtattcggattgctgggacggcgcataccaaaacgtgccttccgcatgattttcgggaaggcacgtttcgatgatggatgaaaaatcacgctccgctggaagccgtcggctcctgctcgccctcggcgtgttcgagctgcaggtcgatgctcgggcagtccttccacaaccgttcgagacggtagtattcgcgggattcctggtgcatgacgtggatgacgaaatcaccgtagtcgagcagcacccactggccttcggtcaggccttcgcgggagcgcggctggcgtttgccggccttgaggtacaggtccttctcgatttcctcggcgacggcgagcacctggcgttcgttcgaggcgctggcgatgagcatcgcgtcggtgatggccaatggttcggtaacgtcgaacgccacgatgtcggtggccttcatgcggtcggccgcggctgcggcgatgcggatggcgtcgatggaatcttgcaatgcaggcatgttcagcgctcccattcgggcttccagccctctactacgtgttgcgtgttttcggaatagaccatggagtcggacgggacgtcgtggcggaccacggagccggctccggtggtgacgccgtcgccgacggtgacgggggcgacgaacaggttgcccgcgccgacatgcacgttcgatccgatggtggtgtggtgcttgtgcacgccgtcatagttggcggtgatggtgccgccgccgatgttggtgtgctcgcccaggtcggcgtcgccgacatagctcaggtgcggcaccttcgtgccgttgccgatgtgcgccttcttcatttccacgaacgcgccggccttgcttccctcgccgagctcgttgcccggacgcagatacgtccacgggccgatgttggcggcgcggccgatgtgcgtctcctgcacgcgggagcgttccacatgcgcttcggcgtcgatggtggcgccgatcagcgtggtgtacgggccgacttcggcggcttcgccaatcaccgtatggccttggaggaagcagccgggcaggatcaccgcgtcgcgtgcgatctgcacgtcgtcctcgatccacgtggtgtccgggtcgaggatggtgacgccttcgcgcatccaatgctcgcacacgcgcttgttgtgcgccttggcgagcgcggcgagctgcacgcggtcgttgatgccttccacgcttagcgggtcgggggcggcgaaagcgccgacggctccattggctttggcggcttcgagcgcgtcggtcaggtagaattcgccctgcgcgttgttggatttgaggttggcgatggcttcggcgagcagtttggcgtcgaacacgtatacggaggtgttcacttcgcgtacggcgagttcgctgctgttggcgtccttttgttcgacgatgcgcagcacgttgccttcgctgtcgcggatgatgcggccgtagccggtcggatcgtcgaggatggtggtgagcacggtcgcgccgttgccgcttttctcgtggaaggcgagcagctggtcgagcgtgtcggtgtcgagcagcggcatgtcggatgcggcgatcagcacggcgccgtccagatcgtccttctgcgtgagctgcgccatcgcgcattgcacggcgcggccggttccggggatgtcgtcctgttcgacgatggtgacgtgctcgttgtaggagcgtgcggcttcggcgacgcgttcggcctggtagtggaccaccacggcgagcgtatcggggtcaagggccgccacggagtccatgacacggttcaggaacgttttgccggccaaggtgtgcagcaccttcggtttgttggaacgcatgcgggtgccttcgcccgcggcaaggatgattgcggcgctcagtgccatctttcgccttccgttttgctggttttcgcgggaaacgtccattccagacggattagtggaggacgcttcggatttcaacgcaaccgcgattgtataaatagggttcggacaatgccgcagccgtcggaaacgccttacgacgcctgcgaaacggagcgtgcgacgcatccgtacgcttcgacgagtccgggcaggtcggctttggcgttcgccggactggtggatggcagctgcgtcatcggcatgccgtccaatccatgcgcccgaagcagcggaacgcagagcttacggtacagttgcgcggctttcgcgccagtggtgaagacatgggcgattttcgatcgcatgattatcggggaaagatcattgggcaccgcattacggatactggcatcgctcgctccatcgatgtcgcacgactcaatcacatcccataacgccatatggtgacgcaaagcgaaatccctacgcaaccccacaatctggtccgggtcccggcactcgcgcagacaaccatcatcatggaaaacagccgccatgaccggccagaaacgattgcgcggatgaccataataaaaccgcatctcacgcgacttcggacttggcacggaacccaacaccaacacgcgcgatccggcatcccaaaccggaccgaatccatgttccacacgcatgggccactctcctaccaccgcatcgaataccgcgatgcgccttattgtattgcgcaatgttgcggcacgacaaacggacgtgtatgttgattgcggatacgacatgagcagcatattcaaaggagaaaacatgctcgaaccgaccaccgtctatacgccatcgccaaaccgatacgacagcatgacctacaaccatgccggcgaaagcggcctcaaactgccggccatatccctcggcttctggcacaacttcggcgacaccaccccatacgacaccatgcgccgcatcgtgttcaccgcattcgacaacggcatcacccacttcgacctggccaacaactacggccccgaacccggatcggccgaaaaaaactgcggacgactcctgcacgaatacttccaccaccaccgcgacgaactcatcatcagcaccaaagccggctacgaaatgtggaccggcccctacggcgacctcggcagccgcaaatacctgctcgcctcactcgaccaaagcctcaaacgcctcaacctcgactacgtggacatcttctaccaccaccacatggatccatccacaccactcgaagaaaccatgggcgcgctcgccacggccgtgagcagcggcaaggcgctgtatgtgggcctgtccaattatgatggccccacactcgagaaggccaccgccattttggatgagatgcatgtgccgttcatcatcaaccagaaccgttacaacatcttcgaccgcaccgtggaacgcaatgggctcaaggagaccgcgcaccgtcttggcaaaggccttatcactttctccccgctcgcccagggactgttgaccaaccggtatctgaacggcgttccggcggacagcagaatcgcacatgacggacgattcctgcagcagagcgcgttgacgccggaacggcttcagcagattcgcgacctgaacgatctggccgccgagcgtggacagacgctcgccgaaatgtcgctggcttggctgctgcacgacggcatggtggcttcggtgctggtcggagcgtcccgtccacagcagctgatcgacaacatcggtgcgctgaggaacacttcgttcagcgacgaggagctccgccgcatcgacgggatctcgctgtagacgggccgccctcgcgcggcagccgcgcacgaggaaatcgggctccggacggaaccgcaacaaatgagccgggcgcgtacgacatcgatcgtacgcgcccggctcatggcttatgcggtcgtggatcgcaggctcactcctgcgggtaggagtcgtcgaagaagcggcgctccagatgcacgatggtgcggaacacttcggcttccggaccatcgatggagcagtattcgttgaccagggagatgaggtcgccgacccacttgcggaagtgcgcgccttcatgcaggtcgacccagcccttgtgcgccggcacctgctggatgacgtcggcatcgacggtgcgcttggcccatgcgaggtacagccattccatgcagcagatcgcggtgatcagttccggccagctcttgtcggacaggctgtcgaggtatgcgccgtactccttgttggccggggtcggttcggtcgcgtcgtattcctcctggctgacgtgataggcctcgaggaagtgctcgaagtaggtggcctcgttgtcggcgaaccactgcgattgcgccgcgagcatgtccttggtctcctgacgtggagcgagtttgatgagacgtgccatcatgccgttgttatagaacttgaagtcctgaatcagatacgccttgaggatggattccggcaaagtgtcgtcaagcagctcgctgacgaaacgcgagttgatggcgtcgtaccagtcctcggtgttgagcatgtacatgaggtcggcgacggagccggcttccgcgcccagccaggcgtagtctccgctggcgggtttcgttgcttctggaacgtggttggtcatgattttctcttttcttggatacgccggcggacggccggcatgttttctatgtttgttgttggattgtgagttgcgtggttcaggccacgacgtcggccttgccggattcgaagcggtcgagcacgccggttttggcgagcgccttttgtacgaaccacatgagcgctccgccgaatacggcgccggagatgacgcagcagacggtgaacacgacgccttgcagtgtcgaccagccggcggtgacgacccattcgtacaggccattggataggccggtcaacgcgccggccagggtcacggtgagcaggttccacttgcggtatgcgaagaccgcgaagccgatttcggcgccgagtccttgggccatgccgatcagcagtgcgtgcgccacgccgaatggattgcccagcagcgtttcgatgaccgcggcgatggtttcgccgaagaaggccgcgccgggcttgcggatgatgatggccacgagcgggccggcgaacagccacatgaaatggaagagtccgcccaggcctggggtgaggctgtcgaacagggcggtcgggacggcgtagatgaagtcccaggcccagaagatcacgccggatgcgacggcaacgatcgcggccacgacgatgtcgaccacacgccatttgacgttgggtttgcgaactgcggaagactggttttcttcagtcatataggtatgtgcctttctcttatgcaaaggcacgggaagtagagagacgtccgtgcgccggcattatccggtatacgttcatacggttgaagcggttgcttcctctcagccataatggcccccgtgtccgcaagcgatattacatggttcggcgcgtttccaggctggtattccacatgtcggccaaaagtctcgtgaaatggaaaaatgggttccgtgtttttccgaaagtcctgggccttcggaaaaacacggaacccatcgatatgcgggaaagccgctgtcgggattgtatttgtccactgttgctttgatgtggacgttctgtccttcgcgcacgaaggcgggaatgccgaccgaaccgtcgtggaaatcgctccagacgattccttcgaatctgaaactaagggaatcataattcaattgacatgccacgaataccgtctgcgtcggatcagagtccatgcctgttgcggcgtccatcgttctcggctatgcgggcgtcggcgaggcaagcatcgaacttatcctcaagacggtcgaagagattctgatagctgttgatactcataaacatgtaggatgtcctgttccgtttgatgatgacgggcgcacggtcgctttgggcagcaccgcggcggtgcgtccgttgctgagctcgctgagtgaactacgtaccaactccatctccctgatggtatttgacgggccacgacaggacaccgggcaggtacgcgcttccgtggatgccatgttccaaagtgatggcgactgacttgccgtggccggacatgtttccgcggatcagtttccgaatgcacgccttgccgcggaacatgccgaacatgtcctcgcaggaagcgtataccggtcgctcaatcgacattcatgcaaaccggcgattccgcctaaagcaccatgcgcaagcggaatacatcaggcttcccttttcacctttcccagcctccttgacagtctggtagcaggccgttccacggcaagatagaacgcctccgctgccagaaggcacaatgcaaacaaaaccaccgggcgcaatagaccctgcacgggaatgtacggcacaatccagtcgcggacgggaagatgggtcagatataggctgaatgaaatgcgccccagccaacggacaggtggcgtggaaagcaggtcggataccacgttgcaggtaagtgcgaccaccaccaatatcaggcatccgcacacggctaaaggttgggcgacaataccaggcagcaaaccgaaaccgctttggcaaaccaagacgatgccacacagggcgagcggtacggcaacgacgtcgcgcatcgtctcgcgcccgttgtccgtaagccgtttcgccaacgcgacgccaagcgcgaacatggccatgtgacgcaacggcggccactgcgtccactccgacaacagcacgcatgcgagcgcaatgggtgccacgaatcgcatgtcggtggcgatgatgacgtatacgggcagggcgaggctgaaaagcaattcccagcacatgctccatgatggcaggtcgaccattgccaatgtggaaccgtccactctggtgccggcggtggtcattgaaagcatgtcgagttgggtgagcagattgtggagccagactgatggcgaggatgtgctgaacgcgtttgcgtattcttccgctttccaccccatatgcatggcgattgtggaaacgatgcagcagatcccgattaccgtgcaggtggggatggcgagtctggcgatgcgacgcagctggtagcgagaccagttgtatgtgtcgattccgacgcgtagcggaacgatggaaagtacaagtccgctgagaatgaagaatagggtgacgaattgggcgcctggcaatagttggcggagggcgcctcccgtgtaatggtatgcgaccactgccagggccgcgagtcctctgagcccgtccaaagcgtatatgcgtgtgtcggagtccttctctttttcgttcacgggtgtaccctatcacgtgcgctggctgtcatacatccgcctacgtgcgtttggcgtgcgttgttcggcgtgcgttcgacaacagtgccatcgtcgaacacgacgccacataacttccattcgtctctcttccccgcccgactgtagtgtcggatcatatggagatccgcgaatacgacatgatgacggacgaggcgcgcggcatccgcacggcggcgttcgtcgtggagaaggattatcgtccggaattcgacgaatgggatgagccgggccgagccacgcatctgctggcttttggaaacggccgcgccgtggcgacatgccgtctctaccctgatctcgaccatgccgattaacccggacgttgggtgattggtcgtttggccgtggtcgccgacgaacgtggccatggtatcggcaagacggtgctggccgaggcggaacgtctcatccggaaggccggtggacatgttgccgccgtacactccgaagataagaatttcgcgatgtatgaacatcttggctaccgcatcaccagcgagcttttcgacaacggtacgcatggttggctggtcaaggcattgaactgaatccggaggaagcggccatcacctgcgaaagcgtccgacacgcggtatcaggtgatggccgcatatggcataatagacacttggcggaaaacctcgggttttatcgccgttcccccatggtgtaatggcagcacacgggtttttggaaccctttgtcttggttcgagtccaggtgggggagcttgaaatgggtcctcgcggagaagcggggacccaaattcatttgatccacatccatcaacggcatgacgaacgtgcgcggtccgattgcgccatgtgaccttccctcattctcgtccggcttacgcaggtaacgcacgccggccgacgcggcaagctcgcggcggggaatatcagttgcggaattattccgcaactgatattccgagctgggttctatgaagttatttgtcaccagataagagactggaacttcgaaaaacaccgcggcttttgccaaatcgttgatggtccacgcaatggctctactgtatttctggctaagcgtaggttggcttatgccaagtcctttggccaaatctgattgcctgacttttgaacgtctttttaaccagaacatgttatcggtgatgatctgttgcaactcgtccgaaaagttcatatctgcgttattgccggcgccttgattgatgtttgttttctcgtccatgttttaaattttgccatatttttattgctttgtccaatactgtgctatagtattggtatgcataataaaacatcagcaaaaccaaacaatgatgttatgaggcatcgcatcgacgaactaagaaaggaggctggaatgactcaagacacttatggccgtgaaattttgcattgcagccagggaacagcctctcaaaaattgtctgggcaactagccctgagcgccttagatattttccgttctgcaactgcattcaatgtttctacggattatctgtatggcctcactgacacacgtactcgaaaggatgcagaaaaaagagaaaccgctatggcacctgcataggtcatctgaaattgagtccgtggacgaattgcagttcgcatccgggcggtggatgaaacccatccagcatttcccaaaacctaaaacagaagagagacagaaaagccggcaaacaccgtcaaccgcggtgattcctacggtagccattcaccgcggcaaccacggaacgtatgaaccggcaagaaccaccatcgaacaaaacagtcggcaacaaacgaccaagcaggtcgtcgtccgcaagctccgcatccgacagaccgaatccgcggaaacgatggccaggatgaagcgattccaacgcttcaagccagcaatcgtacgccacggaggcccgatccaatggaacggcgtcatcaagactgcaatcttcgaaggacacagccgcaagagcaatctccaacatggagacgtcatgctccaacatgaatctgtagtccgacgtgatggaatccaatgcaagggagtcatctcctgtcatagccattccaatcttttcgtcgggttcctataccaaccacttggcgatgggccaatatcgctcaaatagtaatgcccgcacatgagttgcagctcacatacgggcggcgagtcaatcccatccagcatttcccaattaaccaaggttccacggtcaccagccaaggaaccaatcgcagaaagaagagatcacaatgagcgatttcaacgaaacctacgcagatgcaatcaattccaactctgaggaaaggaccagctcaatgtctgattattccacatccaccacaccgaatgaaacccgatatcaggaaaacacgccgaccgtcacccccgaaatcgtggatgccggcaccgacgtggacctggtcgagaccaacccggttgccgctctcgccggaaacttccaagatgatgagctgacagcgcatcctcttgctccgggtgagaccaattacaccgaacaggaggctcttcagaccaccgaagatctcaaggtcaagctcctgcacgctctcgaagcccagtacgatttcacgcatgccgcggaaagggccttcgatggccatatctgggtcgctctcggctatcccgagggcatgaagggctgggtcgcatactgcgccgacaacttcgccgcggagaagatccgcgcgaccggccagcagcgcaccgacctgatcactgggttcactccgggcaagatcagcaaccgtggcatcgccgctcttcttggcgtcgatgaaaaaactgttcgtaatgctaaagcgaaagcaggtattgctcccgcagaaggcaaggtccgtgacgcggcaggcaaactccgtcacgtagacgcgggcagcatgtccagtgaggagcgccgcaagaagattgtggaactctccgatgccggcaacaagcagaccgacatcgccgaaatccttgacgtgagccagtccaccgtgtccgacacgctccgcaaggacaggatgcgtcgcatgagcgaaggactcgaacccgccaagatcgacaacaccgatttcgacaacgccgacgacgaccagccgttggacctcgacatgggcaaccgcgagaccgacatccgctcctacatcgactcgttcgtcagccagtcgtcggacgcccgcggcgccatcaacgagatggtgcatctgctggaatccgacaagtggcagccgggaggctccacggtgagcgagatcgtctcccgtggcggcgcgaacatcttcggcatcatcagcgacatgtgtaagatgctgcgcctgctgaacatcgacgtcgacaacgtcttcgacggggcggacgcggaacttgatgacaccgacaacgactggtcgcgtttcatcgacggatgcaccgaactcgccatcgtctgccaggaaatcaccgcctgacatgcgaccgggatcggacgagcggatcccaaggggtatgggtccgctcccccgccactgaaccaaccatcatcgccggtcgtggaccggcagagagaaaagactgaatcatgaaatacaccaaagacgaggaagcgcgggccgaaaggtcaagcgtcaaaatgtggcccggcatcacggccggcatcatcatcggcctgatcgcgttcgtgttgagcttcgacgccctgcgtctcgtgttcgtggcatgcggcatcaatccgtacctgagctggggtggcccggtgtgcgtggacggcacgatcctcctgtgcacctgggccacgtggggattcaagaagggccacatccgaggcagcgcctatccgtgggtcggtcttgtcctgttcagcagcttctccatcgccggcaacgccctgcatgcgatgctcaacaccggattccacctgccggcatgggtgccgccggtcatcatgagcattcccccggtcgcactcctgtacgcgacccatttgatcgtcatcatcgcgggagaccgtctcgacaagatcaacaccgtccttcccgtcggcttgaccgtcatggaagacactgacgttccggctcccgttcccgcaccatccgccatgccggccccggccatcccgtccgaaccgccggcatcggctcccgaaccggctgaaccggcgaagccggagattccggacctgttcgacttccagaccatcgttcccgccatggaggacgatgcggccccaaaagccgatgaggccgaagcgccagccgccgacgcctccaccccgaccgtcgaacagcacgccatcccgcagccggtgatgcgtgaaccagtcatcatcccgaccctcaccatccaacccgacgagcgggatgccccgaccgtggacggccaggacgagccggctcccgaacccgtgggaccggacgtgacggccgtggaaccggccgacgtgccggaagagaagaccgacgacgcccaggcggaggaaaagccgaagccagggaaaaccagccgacgcggcaaggccggagccgatgacgaggcgtggctcgcatggatcgacgagcttacggctaaaggcgagaatccgaccgcgtcgaaggcagtggacgcgggactggccgcgagcggcagcaccgcgaaaaggtatctcgcccgcatcagaagagagcattcggaaaggttctaagccatggaacaccacagcatgagcgacaaggacttccacgcgcggtacggcgtgaccccgcgggaagtggaggacgcgttggacgagaaccgccgtcgtgtcgcccgcagactctccgaatggggatacgcgtgggccgttgacgagattatgtgcgacgtggccgtggaactgctcaagggaggcctgcgcaggtgggcctcctatgaggaacgcaaaccattgggcgcgttcgtgaacacgctgatcggcaaccggttgggcgagtggatgcgtactgagcggcccaaataccgtagcggcatgacccacgcgccgctacgccgcaggaagcggaaggacacgacgccgcaacgcgaggctttggacgccaccgaagcgagaagaaggatccgcaacgagaacaacgcggcccttgccgaccgactctgcgaggaagccgacgtgttcggcgatcccgattcgaccgtcatgtccgcgccggcgggagacaagtccagttatcaggaatggttgaccggcggcacccagccgttggaactggaaagcgacaagtacgcggccgacatggagggcctgcgccaggacgtgacgactcgatgcaagcgcatggcttgggagatgctgatccgtcaatgccttaccgcgacgcgtggctccgacgctctccgcaacgacatccgtcgtttcctggagaaccatcatcatggcctcggtccgagcatcgacgactacccgtacattctcgcggtcatcgataagtacaggaaatgatcgtccatcggccgttaccggaccccggtgacgtggagatggatgccggcatggtcttttcttctttctccgccatgccggcgacatgccggccatgcgcgccgaacggcaacggcgccgccgacgcgtgtccggcaccccctcgacagactttcaaaaccgagcgaacaccacaaccgacaaaggagcagacaatgatcagcgtcatcaaatgggcatggcaggccaagccggatactccggccgagaagcttgttctcgtcagtcttgccaacagcacgttccagacgcctcgggaggacatcgccgtcgtgggcgtgcgcgcgttgagagggaccgcgtgcgacatgacgccggcggaactcgacgcgatcctggaacgtttggaaaagcagggtttcatcacgccgctcgcggccgacagcgaaccggtcaaatggcatataggcgcgttggagcgtgaacgcggcgaggaaggcccttggaaggcatggcgtctcaacgccaagacggaggaaaaggagacggtgagatgagcgtcagagctgtctcatgggcgtatggcctgaacctcggttccatgacgcagaaggcggtactgctctacctcgcataccgggcccgtgaagaggataactgcgcgtggccttctgtgaacctcattcaagtggagaccgaattgagcgaacgtgccgtgcgcaaggcgttgagggaactgcgggacaagggactgatcgcattgggagatcaggaactcgcggcggtcgactttcatggagacgtcgttcccgtgaaccgtcgtcccaaggtctggaccctgcggttggacgcttccaccgaatcgtttaacggcgtcgaacgtgccggggacgttcaaacggcatacacgggaaggagcgtccgatcatgactgtggtgaccatggtatgggtccaggaacacgtgcacgaggtacgcaacgcgaccaaagccgtgctctcgtatctcgctttcaaagctcactacgatgacgggacggccgcatggcccgcgataggaaccatcgcgggagcatgcggactgagtgagaagaccgtgcagcgtggcatcgaccagcttctcgatcttggcctgcttgaacccggacaacagaccttcagcgccatcaatccgaaaacgggcaagccggtcagacggaactatcagaccgtcgtgtggaacgtgatctgcaaggaatcgaacctgccgaccgaaccgttcgaggaccggaacgcgtccaaggtccgtgccgcgatgaagcgcgcggacaaggcgaaagccaaaatgccttccccggaaccggagggcggggaagacgacggacgcgaggacaaaatgtctggcttttcggatgggagccagccggaagagacgaaagccaaaatgtcgcctctggaaaacgttgaaaacaagccggtttcctccaatcttcccaaaatgtcgcccctggagcggcaaggtggagaaggcgatggaagcgaggacaaaatgtccaaaaatctggacaaaatgtcgcccaataatacattgaaatacaattacccctctctccctacgggagagctccccgcaagcgggaagcgccccggcatggaggacggaaacaacacgacgacgggaggggattccgacgcggcgaccgtgatggaccatctcgcttccgtccgttcgaagctgtcgttgaccaccacggaaccgaccaaacgtgatttgtccaagatcggaaacctcgtcagccgggtcgtcaaagcccatgacggcgaccgtgcggcctcgttggcgcttatcctcgcggtcatcgactggctgcccgcgaacacgttctggcttcgccgtgtcgattccgcgcgccgtctcgccgacaactgggaccagatcgccaacgactggaccgtcgcccagatcgaacgccaacgcgaacgggacgccgaagcccatgagcgtgaccgtaggtccgtggcccagccgaccccggtgccggaacgtcattcggaacgtcacgtgcattcgcttgtctgcgagcatgtcctgaacgacatgcggccacacgaggacgaatacgaccacgagggaagcctgcgctacggcaagccatccgaatggcagatggcgtgcatgcggcacgccgacgagctcaaccggcgcgacggcatcagcaccgccgcatgatccgaaagaagggatacgaaatgaaagactatgccgcatggctcaaggcctgggaaacctacaacctgcacttctactccgtaccggcctggctcattctcgccctggtgttcagcctgatagcaggcatcgcgttcgcggtcgcccgcggcttggcaaaaaagagcagcccgacaggcccggcctgcttgtcaacgccatgctggtcgtctcgctggcgttcggcatggtgggcggtcttgccttcctgcagtccatccgcatcaccgccgagatgttcaaggaacctttcacggccgtgtcggaacctttgaaattcggctcccgattggagaaggacaccggagtgaacgggctgtcctgcggcacgagccttgacctcacggtcatgcccgccgacgggacctatgactgccgttatctcgacgggcacggcacgctgcatcgcgacgcgacgcttgtcgtggatggcaccaaagccggcctgtacaacgggcaaggcaaaacgatgtccgctgactgaacctcccgccgggaaagacaaccataaccagccaagcgaaaggaaaacacgatgaacggttccggacagcggaccatcccgaacgtagtgtttcccttccggtcgatgatttcgaaaagcttttcagttgccgacaatggttcggaatatcaggtgcgaggaaacctcgcacctgatattctccattgcgggttcgccgcctgagtccccatccgccaatcctccaggcgccgggacgattggttttgaaacagaatatcaggtgggacattatgtcccacctgatatttttattggagtgccggcttctcttttacttcgggcatgttatccacggccatgcctcgtcctgtcggatatttcccgtcgtgaaccgttggaaacggcggcgtcattgtacactgtagccatcggacacaaggaggctgatgcatgtcgaacacgggattcaaggttcgtttcgatgagaacggcgacatcgtggatattcttggggggggtgtcttaaaagcactcccgaggaaaaagtcaggcagcgtttcatcgagaccctgatcaacgagtaccattatccggcgaacaccatccggagggaggtgccgatccaacatgggtcgaaggagctccgggacaaggacgggaacccggtgcgcgcggacatcgtcgtctacgcgtccaaggccgcctgcctgaaccgtgaccagggcaagatcaacttcgtggtcgaatgcaaacggaacaaggtggaggacggatacgcccagctggtctcgtacatcttcaacaccagcgccaatggtggcgtctggacgaatggtgacggcacggtcttctaccggagagagaacaaggacggcattcaagtcctcgaggagacccccggtctgccgaggtgcggtcaaggatgggaggactccgcgcataggagagttggaacgaccccgtaatgtgcgcagactgttggcgatgtgccataaccgtctttacggcaggggcatggagaacgcggattccgaccttaccatggacatggtgcgtatccttctcgccaagatctatgacgagacggtgacttccgacaccgcctacccccatttctggatcactccggaacagtacaagtccgaagacgggcgggccgccgtggcgaaaaccatccgtagcctgttccatgagtacgcggaacagtatcccacggtcttcgacaaggacgaggacatcgccgtcggcgactccaccctcgtcgaagcggcttccgtgctccaggactattcgttcgtcagcagggaggacgatgcggacgactgggatctgatgggcgcggcatacgagcagttcacccatgtcacactcaaacgccagcagggacagttcttcacgaaccggctcgtggtcaaagcgatggtcgatatgctcgaccccgacatagccgacaaagtgctggaccccgccggcggcagcggcggtttcgccaccgccgcgttcagatacaagcggcgcaaagccatcgacggcaccaaaccgggcagcccacaacgggaaagacggctcggcttatgcaagaattcggtgttcctggtcgagatctcgaaaagactcgtgaagatcgccaaaacggcgatgcttctgaccggggacggcaacaccggcatgacccagggaaactcactcgacaagtattccaatctggacgggtggataaccagccactgtccaaaaggcacgccggacatcatcatcaccaatcctccgttctccgggcaaaaaaccgaatccatgatgatggatccggacatcctcaaattattcggtttcggacacagacccgatccggaaggcacgttccccacgatcacggacgatgatgatcgggatgccggccacggcaccctattgatccgtcaggcgccggagctcctgttcctcgaacgctgcatcgattggctcaagccgggcggtcgcatcggcatcgtccttccgaaaggaatcctggacaaccgcacctacatcaactaccgcaggtggatgctgtcgcgatgcaaggtggatgcggtggtcacgctgcacaagaacactttcgaacccgacacaggcgttcgaacatgcgtccttttcctctccaaacctttggaagacgatccggtacccggcgactacaccatcttcatggcccaatccagaagggtcggcaaggattcgaagggcgaaccagtgttcgcacttgacgaaaaaggctccgccaccagcgagctggatgaggacctgacccagatcgcggaagcatacaagacattcagagacatcggaacgttcaccgaatccgaaacctgtttcaccgcggaacgcggcgaattggacgacaatctcaacctcaacccgcagcattattcacccgaattgaacgcgacgttggaaaaagtcagcaaattcgacgacaaacccgattggtcggtcaccaccatcggccaactcgacaagaacatccgcatctacatggggccacgatggagctcacgaagcctcgtcgtcgaagacccaagcgacacgacgaatctgacaccgtatctcaccgccaacggagcgttggagcagcgacgaatgaccgtcaaatggtttgacatgtcgcgcgccaccgacaaacagaaggaatgcgtcagaatgctgcgcgtgcagaagggggacatcctcatttcccgttccggcacgatcggcaaagtcacctacgccacgcggatactcgcggacaagtacgtcatcagcgacgacctggtacgcgtccgcgttcccgacgagaatatgagggcgtatctcctggcgttcctgatgtcgtccacggcgatgaatctcatgaaactcgacgagttcggctcggtgcagcagcatctccaaccaaggcacatctggggtctgcccgtgcccgtaccggattcatgggaacaggtctctcctatcatcgatgccgggaagggaatgatctccgcaatggagcaaacatcattggccgatgagtccctgcggacgaacggcttcgattccctgatcgaataagcgaggcaccatttcctggcacggaggcagaatatcagttgcggaattattccgcaactgatattccccgccgcgagcttgccgcgtcggccgtcatagtcttgcgtggtctcattcgctccatggccaggcgttgccccatatcgcgaccggtttgccgaacctgatcctccatggttccagatcgaggctgaacgagtcgaacgcccaatggaatctttgcggccaatcatcggtgaacaccggcaagggcagtacctctagcggggacttgtcttcaggatcgctgaacacgcctccccggccctgatagttgtcgtagacgaaattgtctccttggagactgccgcatttcgggcaggttatgcccagatatgcgtaccccgccgacttggaatacgtcgggcgtacacgccagcagtcggaaagcgtgcgcaggaatggttgcgagagtataccggcgttgtgggcgtcgctccaggatacgacgcggcaatggtatccgtcccgtccctcgagttccaggaacagtccgctttggatgaccaagtatccgcacttccagcagggcacgctgcgcaggccttggaccaatcccactttgtggagtctccagagttccagcttgtagaggtccgggtcgtctcccgccggccagaacggttccggctcgtccacgtacaacgggcgtgttccagataacgggcgcatctcgatgctcatagttcactcacctttccgtctggcctgtaatggacgatactatcttcttgaccggtcctcgtcgagtcggttttgcttctccatggctcccgtccactccccctcgctgattatcggcgtcgttctcccccgcatccgcgtggaatggattgcaataagcgtgccgatgatgggaggagcctatggcggagaggaccgggaacggcgggcatggtctggtgaaaggcgccaccgtgttcggtctggccgtgccgatgatcgtcatcgtgccgctcgtcatgctcatgagcctcagcaccatcctcgtcgccatggtccaatcgcagtacggcacgaactgtggattgtccaacgcggccggaacaacgacctcatgggtcgaatgggccaagaacatcgccgcggacgattcccacggctacagtcagccgcgtcgtaccggcaacccggactacgattgctccagcctggtctactacgcgttgaaacaggccggcctggacgtgggctcgtaccccttctccacctacggtgaggacgcggccctgaagcacgcgggattcgaacgacacgactggtcacgcgtgtccgacctgcagaccggcgacatcgtatggagttccagccacacggagatctacatcggcgacggcaggttcgtgggcgcgcaccacgacgagaacaatggtattgaaggtcccaagcccggagaccagaccggcgacgagatcagcatcgactcgtacgcggccggctacgcggcctactaccggtacaagggctccatgaacgtgaacgatccccatggcggccaatcatccgcgcaggccgtgtccggcagcaccggttccacgaacgtggtcggcatgagcgagaaggacgccgaggcttggttcaacgggcagcaggggccgaacaacctctgcgtcgcgtacgcgtacggccaatgcacgtggtggacgtgcatgcgggcgaagaaactcggctggaagaacataggccaatattggggcaacgggcaggattgggccaggtccgccacagcggccggctacaagaccacgacggacgcgccggtcgcgggttcgatcatcagctggcccgccggcgtgcaggattcggatcccacgtacggccatgtcggcatcgtcgaaagcgtggacaccgcgaagggcaccatcaccaccagtgagaagggcgccggctacaaagtgtattcacggaccatgccgatcaggaatggtggcacgtacgtgctgccgaacgacaagctcacgggcatgggcgcgtccggctcgtctggcacggaacagtgcgtgacgggcgacgactccacatccgacgtgtccggggacaaggcatcggccgcggacgcgaagaagatggcccgacgcaaactcaaggacttcggttgggatgatagccaattcgactgtctggacaagctctggacacgcgaatccggttggcagtggaacgcgacgaatccgtcctccggcgcgtacggcatcccccaatcactgcccggcggcaagatggcgtccgcgggacaggattggaagacgaacgcggccacgcaggtcaaatggggattgggttacatccaacaacgctaccagtcgccttgcggcgcttgggcccattccgaagcgaccggctggtactgatggacctcgaatggaaggaaacggaaatggaagcattgaacctcgcggacaacgcgttgaagggtttgagacccgacccggcctgggatgtgtccggcgtccgagacatggccggcggcgtgatcgccgtcgcgctcgtattgtgcgtgggcgtgatcatcatcggctgcgtcagcctcatcccgggactggtgtccaacaaccagatggaacgcgcgttcagttggaaacgcctgctcgccgccatgctcgtcccgttcgtgatcggagccgccgtgagcggatggggttggagctgcaacgtgttcggctccaacgggttgggcgtgaaccgttcctacacgcaggcgtccggcagtgggaaaaccaacctgaaggacggtcgaggcaagggcgacgacagtctgaccggactggtcaaacagttgggcgacgacatcgtgtccggtatctccgacacggtcaagaccaccgtgaaaggcgcagtcgacgacgctttgaagggttggaactgggtctccggcggtgacggcaagggcaacatattccagaaggccggccagggcatcaaggacggcgcgaccggcctatggaaatggttgaccggaagcaaataatccccctgccgattatcggcgtggccgggccgtccggccgcgtggaatcttctgaaaggagtgtgcatcatgttacacaatctcgcggcgcccgccgcggcaacaatcgtgtccgtcgccaccggcctgaacaacggtgacatctcgaacctgaaggtgagtccgaacttcacgttcttcccgttcatgcagttggtgtccgacatggtcggcggcctgtgggcgttgagcctgtacatcgccgtcggagcgtggatctgcgcggcgatcgcctggatcgccggccgtgtgatccattccggtccgatgcagcagtattccggcacggtgttcatctggtgtgccctggcgacgatgatcctgggcagcgccatggcgatcgtgaagttcttcgcgacgcaggcgctgttctgacggctcccgcctgacacacccctattcacgccgtggccgggccagtcccgtccacggcatttccttttttgaaggaggccggatgtcactcatcatccagaccgtcttcgcgaaccttatcgactggctgttcaaaccgttggacaacctgtgctcccagctgttgacgggcgccttcagcggcctggtgggcagcatgtccaacgacgaatggaacgtcgccatcaccgcggcgaaccgtatcggctggatcatgggattcgtgaacatggcgttatgcgtcatcggcgccttgcaggccgcggccaaaggcagcgtcgccgacgtgatcaaaagcttcgcgatggccgtgctcgcatggccgttgaccgcggtgtgcatcagcgtgatgatcaccatggacggcatcgtcggacagatcacgcacaagatcctcaccgtcccgttgaacggtgccggcacatccgacccgttcggcgacagcatcgtgtcgaacctcatcggcacgatcgtcaagaccaccggcggatacgatctgatcatccgctgcgtcgtggacttcgtgcttttcctcgcggtcctcgccctggcgggcatgctcgccgcacgcgacatcagcctgatcctgctggcctgcgtggcgccgctgccggtcatgatgaccggttggaaggtcacgcgtcccgccgcggcgaaatgggcgcaggccgtggtcggcgtgcttctgtccgcaccgttgagcgccctggtcatcatggtgggttccggcatctgcttcgtgtcgaagagcaatccgaactacgcggaatcgttcttccccgcgctgatgggcatcgccacgatcatcctggcgtgcttcagtccgaagcttatcatgcctgccgtgagcttcatcggcgagaacgttaccgccgacatgcaggagcgtggcggcaagatcggtccaagcgccatcaaggccgcggcccaggtcacggccggtgtcgtgcaggccgcgaccacgggcaacacgagcggtctcggcaaggcgttgaactcgggagccgcgtccgtgctttccgcatcccaaggcaatccgggcgaattgggccgttcccttccgggcctcgcctccggcatcaaggacctgctgcccaaggacgggcaggccggcggcgcggacggcgactacacgtcgaacggcggtgttggcgatgacgcgcggaaaacccagtccacgccggacgtccagccggacggcgtggaccattccggttcgagccaggtcatggacgccgcttcccgtccaaacgacgtgcctccgctcccaccatcggcgacggatggaatggaccgttccggttcgagccaggtcatggacgccgcggcgaaaacggatgggaacgagaccggttccggcctatcctccgtccctcccgcaccgcaacccacgccggacgtttccgttcccaacacgccaagcgcgccgggagcacccggcgttccaggcgctcctggaccggccggtggccagggcggtagcgcgtacgccgaaggaggccagggaggccagggtgcggacggtggccagggcggccagggctcggacggcggacaaggaggccaaggcggtaccggtccggtggcgccggtggccagggaggctccggtggccgtggcggaaacggcggcatgggcggctcgtccggcggttcgaacccgtaccagggcgtcgacggctccccgtccggtccgaccgtcggctgacgccatccgttatcgacacgcggccgtgtggccgtaataccggagggaacccgccatcctgggcccgaccccaggcgggttccctccattgtttttccgacaaccgataatccgatggaggtttccatgtccgataacgaatccaatgccggccggagcagggtccccgccgcgtcgttcagccgactgtccgccacacgcgtggtcctcggcctcgacaaggcccagctgatcgtctgcgtcatcggcctcgccatcctcgtggccggagcggccatgggcctgaacgtgccgatcatgatattgggcgcgctcgtcctcgcctacggcatcccacgaatccagggattgagcctcgtgtcatggacatggatctggacgcattggcgtggccggctgaaggacggcacgaaccgttgggcgtactcgccgctcgcgtccggccgcccgttgggcgtactgggattgtacgggcacgtcgaggaccgtgcccagaccatcgaaggcgacggcgtggaggtcgtgggcaccccgttccagggagcctgctacctgtgggatccggacaaacggcaggccactgccgtattgaccgcgaacgtggaggaatgggttctttcctccgaccggcagaaggccggccgtgcgatggcgttgaacacgatgctcaaggaactgtccgaaacggacggtttcgtcgaattgaaggagacaagcttcgtgcttcccggccacactcccccggaacccgaatacctgaaggatcggacaagaccccgcagtgggcgcgcgaggatctggcgaacctgtggcacctgcccgacatcctcaccccattgcagaactcgaactacatcagcgtgagcgtgaacgcggaccgtctgccgcacgtcgtgaggaaggaccggacggaacgggccgcggtcggcatcgccatgggcgacctgatccgcatgaccgtcgccccgtccctgctggactgcggcgcccgccggaacaccatccactggtgttcagtggacgacctgcggtatctgatccgcaccatcgcggacccggaacatgcgaacgaccgtccaccggtcaacagggacgatccgaccgtcacctgggtggaggaagccaaggaacacgactacatcaccttggactcggccgtggcacgctcgttctggatctaccagtggcccgacttcgacgtgcaggccggatggatacgcgacctggtcaccgaccggcgcatgatggcgttctgccatatctggcgtccattgacgatggaacagtccgaagcggaactgcgcaaccgcaagagcagtatgcgccaacgcgccaaactccaggaccagcgtgagaaaagccgtgacgaacgccgcgaggagaaggaacaacggctgcgcgagctggagcaggaggccaactggccggacaccgaccatcagggattcatcaccctgttcgcgtccagtctgccggaactcgacgtgttcgaccgtgacatgcagaacaaggccaagaactggcatatgaaactcaacccgatgaagggccagcagcgtgccgcgttgacgaccatccttcccctcggcatctgatcgggacggtcgacatggacgatcgatggatgcgggcgcttctgcgtccgctagacctgctggccttcctgtccatgacgcccgtcccgtcggatgcgcgcaccccgcatccagggcgcgtcccgccggcgcggcgtcccattcccggaagggcgtcggacggggactggaccgtccgctggccgcgtccgccgccggcccgcgcccggcgataacggcccgccggcacgtgaactagctgaaggaccgcggccgggggctgcggggaacggagaaaagaaaaatgaacacatcggtgaatgagctgctgtcgaatccggcattccggccgctggtactactggatgtgcttgcggtgttcttgatgatcatatgtctggtcttccgacgcatgaggaagggctattacgtcgagcaggcgaatgacgcccgcaaggcgacgatgctgaacattgcagtccgcaacgtcaccggaatgggggtttattcggcacccggctattgggacaacggggatctgaacctatgcaggttcgagcgcgccaacggcgacatcgttcccggcgcggtggaggccgacgggaagggcgggctgcgcgtctatgagataacaggcggctcacaccggtccgacttcagctaccggctcctgggcgaggcggaatacaaggagatctggaagaagccgatcaggaggaggttctgacatgggaaggcagggggaactgctgaggctctcgatcctgctgatgggacggatatgtgcggaggacgaatgaaatgaaggatatgaccgtggagacgttgaacttcatcattctctgcatgggactgctgttcgtgatggcgggaatcctcctgatcgtgggaaagctggccgggaaacgtctggcgtccattgcgttcggcgtgctcatgatcgcatgggggcttctctgcggcatccccgaattacggtcgtggatgctcgcacgcgccaccgacctggaacacacactggaggccatgtgggcggggctcgatggcgacggccggatgcttgtctacatcttcgcactgtggctcatgggcgcaatcgtcataatggtgggaggccgtcgatgacatcgatcgacggattgttcgcaatattggaggaccggggcctgatgcccgcggtcgcattgttctcgctctcggccgttctcgggcttctctacctgagctctgggaacctcaaggcgccgaacccccacctccgacaggacgtggatgccaggcattccatgcgcagtgacatggcccgtcttccgattcgaggaatgaccttgaatcgggcttggacggcttatctaccacgcttccccgtcacccgcgttccgcgataacggatgccagtcatgtggattcgtcgaaaaaggacacagtcgggaaggaaagtaaaaaacatgaatcttgaggattcgatcgtatcaaccatttcggatgccaaacccatgatgatcctggcgctttgcactattgtgcttttcgtcattgtggcgagcctcatagaggcatggctagccaaagcgcggaaagcgaagtccgaggtcgataccctgccttccggtccagaggcatcccagcggtcagtagagaagagcgaggctgtggaacaggccgtcgacaatgcaggcggattcgacctcgacgaaagaaggaaggcccgcgcgccgaaatcgatcccggaccggcgcccatggttcttcaaaaccgtgatggggcgcgggcttgtatgcctgctgacgaaggtcatcccgatccttctccccgtcgtatggttctcgctggtcgtcatgggcatgctgccgaacccgctggcgctgttcttcttctccccggacccgcagcggatgaacgtggtctcgccgtccaacggatggttctggctgcttttgaccatgttcatcgtcgtcgtcctgcacgattcactgcccgccctgctgcgaaggctcggttggatgatggatgagcccaagaccgcgtcggcctcgttgacgtccatggtggagagccattacggcgtatcgaatctggaggtcgactggttcggcgccgcggccggaggggtcccgccgttcgacggactgtactcctgccgctacgacaccggacggcgtaggaacaacggcgtactccgcgtgcggaatcatcgtgtctggctgtatgggccggacggatgcgaggaggaacgccatggacactgagcattcctattacgcccgcgttctggatgaggtcgagcgtctgcagccggtcggggctggtggcgggatactggtattgaatctcatgtatccctgtttcgagcctggggcgcgggtcggcatggatctgtcggtgcgttccggcgaagacgcgtttcccgtggggacgtggaaggtcggtcgaccgtacacgaaccggtatatccactgtccggtgcgcacggccggccgcaaggtctcccgttgcggtcttcctttggtggcccctctcgaccggctcaatggaatcactggattgacatggaccgtgacggtggacctcccatatgctgatgatccgatccggatcatccacaggagtctcatattcgacacgcaacttaaagtcatgctcacaccggaacggcctcacggcagtctgatggcggaatggccggccatgggacaaccggacctcacattgaaagtgaacggaatcaaacgggccttgtctccgctggtcgagattgatggatgcgcgggaatgccaggcgtgttcatctgatgacctgaaaagtgaaacgggaatggaaagtgaacggttccgtcacatggcttgtagacggtgttcttcgtggtgcgcgtgggcggcctgaatgggtccagccagggcggcgaggatcgtggtggcgtcggagtcctcgaccgtgagcgaggccatcagattggaggcctgatcgcccgtgagctgcgcggccggagctgtcgcgggagcgggctcgttctcgtccgccagtcgttcatagatatcggtcatttccgttgtctccatttcatccagcaggtatgtcggccagatgctcgatgtggaacacgagcatgtcacgtccctgcggccgggcgagcacttctatcagcttgtcgttccatgcgccggcatggcattaatcattgcaggtcctaatggatgggcttgtttcgggacccgtatccttatcgcggcggctcttcagtgacgcatgtgagaaagcatagtgaatgatagtaaggagctgaagcgtggcggaggatatcgacaaggtggagcgtgcgcgtctggcgcgcaaggcgatcatcgaccatatggattgcgacgactgcacggaggattacgtgttccttctgcggcagggtggccgtgagttcggcatgggactgaccacggtgctttccatgctcgcgttcgccgaacatgagggcgcggtgccacccctctcgacggaatggtggataaaagtcagcaggaggtaccagtgagtttggtcctgaccgatgataggcgaatcgtcctacgattggaaccgatatcggttccggttagtggaggttcgccatggatgttttcagaacaggtcgaagaggacgcgttgtgccgttgacggaagaaaattatcggcgggaaacgaaccggaaagcaccgttcgtgcagatgcggggcggacatccctcgtatttcgcggtatgtccggcgtgcggcaatccgatcctgatctgcaacctgttcaaaaggactgacggaagccggtcggccaatccgtacggccggcattactcggcgtcggttcctggagtcgcggactatgacgagaccgcgtacatgttctgtccgctgtccaggaaccattcggatcccggtaacacgcgccggactccgacggataaggccggacgggaactgtacgctctgatgcgcgaccaattcgaccggtatgtttacatctgggagaagaccacgggcctgcatgtgggacgtggatacgctcgggaactgctgtccatgtggcgtgccgatgagggatggcggtattatcgcgcctcctatttcaaccagtcgttcatgcttttctacgccgcgcccgcccagaacctggtgggacggtacttgctggtagatggcccattgcactgttatctgaaaaagctacagatcaaaagcattcgtttcactccgaccaggatggatggttatgtccgtgtcgatagagcggagggccatggtttcgtcgatttgtctttccttatccacgatcagagtcctgtcatgcgcggcgagcattgcgtggaaacctatcggctgtccgtatgcttgggtgacgtccggttcgaacctgatctgaaactggtcttggataccggtttcctggacagtctcatggcgaaggatgattcacataggaaccgaacgttgttggacatggccgccgacgtgttggattagaaacccgtatcggctgttatcggtcggccgtcatgtgggatggttgacggaaacgtccgggcttctccctcctccccttgagggagcgtccggcgttcccgtccggcctacgcttcaaggctggtgagcgatcccgtccggatgggttctaccccttcccatccgacattcgacgggagccgtccgccggaccgttttctgtcccgtttctttttgtctatcttctcgacgggaggtccggcgggcggccttctcatttttcttcaggaggtttcccatgattgacgacgacggttacgacggcatacggtcgcatggcgtggacccggattggaatccgttctccacgccacgcgacgacgacccggacgatatcggctgggatgacggcagtgagacgcctcacgccaacccgtcgcgcatgtcaaggaagggcgtggccgtcctcaccgcatgcacgctcgtcatcgcggtcgcgggcatcggcatggtcatcacggaattacggttgagcgtgcgccacgaccagctcgtctcggaatgttcggacgcggtggcgtccatgaaccggaatcgtgaacggttggaaggactcgtggccgtggacctcaacatcgacgggtccgttctggacgggaaaagggccggacgatacgaatcgttacggaccatacgacgcgcgccatccatccaatgcgacgcgactctgaggaacaggcaactcgaatcgaacacggcgaaggcgaggaaacaggcgtccgcatacgtggaacagtccaaacgggtggccgcgttccggaaggagtacgacaagacccgatccgagaagtcacggcgtgacgacatgacgcgactatccagcgacctgcgtgccgcgagggacctgctcgaccggacggccggcatggaactgtccgtcccgtacctgcggtccaggctcgcggacacggtcgaacaggcggaaccgttcgacggggccgacgatgcggaccatcgacgcgtgtcggccttggcggacacgttggaggacctgatgaatcaggtacgagaaaacgccggactatgagacaagggacgtggctggccaatgcgggcggatatgccggtcatggggcggctccattagaatgggcatcatgatcgacatccaagattttgaatcatgcgagacttccggacagttctacggcgggaacgccggacggaagatcggactcgtctggagggccggcgactggttggtgaaattccccggaacgaccaggaaccttcagggcagcgttccttcgtatacgaccgcgccggtgtccgaatggctgggatcccacgtgtatgccgctcttggcataccggttcatgaaacggtgctgggaatccgtgatgggcgtatcgtctgcgcctgcagggacttcaccttcccggattccagacttgtcaatttccatgatctgaagaactcgctttccgatgacgagccaggattcactgaggacgcgtccaccggttccggagtggtgctcgccgacgtacggtcggcgattcaccgcatcccggttcttcgctcgatcgatggagtgtccgaccggttctgggacatgttcgtggtggacgcgttcatccgcaacatagaccggaacaacacgaattggggcgtgctcaggaatccacgcggggagttctccctcgcgccggtctacgacaatggcaactcgttcaacaacaaaagaaccgactcgggaatcgaacgccgtctcgccaacccggatctcattcgccaagacgcgttggacgtccgctcctgctacgtgacggataggggaaaacccatcgccccattgaaatacctcgcatcaggacaggacgaggaatgcaccaaggcgttggatcgcttcatggaaagatacgatccacgttccttccatgatctgcttggctccataccgtccatgtcgcatggtctcaccgtcgtgcctgatggtttccacgaataccatcgcagggtctgcgactatcggtacgagcacgcgttcatggaggcatggcgcgacctgcatccaactgtgggtgtcccgtccagtccggaagcatccgtccccgagcctcttcctgatcccgattcctccgtcttaccctcatcttctgttccgacgtgtttcgacggtccgggaatgtgacgcgtccgtctcgatatcaatggtcaaggaacgtggaacggacaaccggaccatcgaaagcgtatcctgaaaagtcgcctgaaggttccggactgggagaggatgacgggcaatgagctgggcggacctgttgaaaagcatcgtatgcgttctgaacctcatcgcatgcgtgcggttgaccggaccatatctgattccgaaacggtccgaccgtgaatggtcggaagcgcgacgtcgtaccgacctgtactgtcgtctggccggctggataggcgtgttcgcctactcgtacggactgggtcacgggctcatgcatgcacgggacggatggaccggcatggcatccggcgtggaagtgattctcctgctggtccaaatcctgaatctcgccatctggacgtatctgctcgttcgctcgcatggcaggagcctgtagcctcttccctgtgcgatatcaacaaggggttatgtgggtaatatgaatcacatacgtagtcgagaaggagtcgtcatggacgagaaagacagcatgacgccggacaccatcccgcagtccacgcccgtggacgggaccgtttcggccggaaggaagaaccgcaggccggtcgtcatcggcgtggccgccgtcgcggccgtcgcgctggtcgcgggtggcgtgtgcggatacagggcgtacgagaaccatcgggtgtcggtggcgcgccaggcgtgccagtcggccgtcacggacctgggtaagacggtgaagtcgtataaggcgctgctcggcgcggatgctacgacggccgcgttgaagacggatgcgacaggcgtgaaggacgtgaagacccttgacgcgctcaaacgggccgttggggcggagactcccgccatggtcaagtgcgacgcgtccgacaagaccggtctggacgaggccaccgccaaggcggacaagacggccaggagcgtgaaggcggatgcgaagacgctgcaggccgcggtcagggcggtcgaatcgtcgaagctcgacaagacggtggacgatgcggacgggctgtacagggcgacggaaggcaaggtccaggacgataagacccgtgacgcgttgaagcaggccatcgccaagcgcgacgccgacgccatcgccaaggccgtcagggccgtgaacgattcgaagacggcgaaggaccaggccgacgccgaggccaccgcgaaggcgcaggccgaacaggaggccgcagcccaggcggccgccgcacagcaggcccaacagcaggcgcaacgctcgtactcgtacggttcgtattcgtccggcggctggtccggttccgccggtggacggtcctattccggcggatcgtattcaggcggatcgcaaggccagggtggcggctccccgagcgggaactcccccgcgccaagcatccactacgactgggaagacaatactggggatcaatacaattgccagccggataaattctgtccgcttggatgattcatttttcccttgtcctttccgcaggccccgtccaacaaatggacggggccgttttcgtccgcacggcataccaccccaaaccaatattgccccttatcgaggcgtgcgcgcgtggaacggattggatgggccggtccccgtgaggggaaccgcgcagggaacgtgcgttcccgccgtcccgtcccgcccgcacggcgggacgttctgcaagcagaatctctgaaaggagacggaacattgggttccaacaagaacaagaaatggggcaaggccacgatagccggcctggtcgccgcggccacgctggcgtccccggtcgtcggcgcgttcgccgccgacggtggcggcggctccggtgacggcacgggcacgggcgacggctccgccggcggcaccggcaagatcacatgggtgtacaaggactccttcggctccccgacccgcgagaatgtgaaatccgccatgggatccgtcggcgtgaagtcgatggacggcagcgagtccaacagcgccatcgacgaggccgtgaacggcgcgaacgccgaatgcgtggcccgttcgaaggcttcgggcaaccagaatccgacctgccgcctcgtgtccgtgggcttcgtgcacacgcccggtgcggacggcgactggtacacgggcgccaacggctccttcagcgcggaccagtggaaggcggcctacaacgcctccggcatcccgaacggcacctattcgtatcagggagccaactacacgacccgttcgttcttctctgatggacagacttccatcaacagtcttgccgctcgtgagatgagcaaggccccgcgcgcggtcgtcgccatcgtcctcgaccaggacgagccgccggtcgactacgatctgaccgtcagcacgcaggcgggtggcctgttcacccaggccggttcgaccgatgacgtttccgacgcgatcaccaccagccgtggcggcagcacgatctccgaggacgtgacgggcaccgtcacgctgcattggaccggtctggacggcacgacccgtaccgcgtccaagcagttcacccagaacaacaacacgaccaaaagcgtctcgttcggctacaaggacgtcgacaggacctggaaggtctggccggccggctcctactactatgatgtgaccgtcggcaagcagggccatatgaaggccgcggccagccatatgggcgctcaggacgcgaaggaatcctggaagcccgttccgaccccgccgtcgaagaagctcaccaacatggcgggccagcaggtcaccgccgaggcccagcagatcgcttccggcagcctgtatacggcgcatatcaccgcccagtcgaacgcgtccgagcatttctggctgtacgacacgatcgacgtgaccggccagaaggtcctgatcggcggcaccgacaaggacgactattcgaagatcaccgtgaccgaccaggacggcaacaccgtcaaggccgacatcacggtggacgattcccatgcgggcaaacgcgtcgtcaaggcccacgtgctgaacccggtctccggacaatacacgttgaacgtgccccagtccgcgaccccgaccggcacggactacaccatcccggacgacagccaggcctgctggaccggcgacgaatacggcagcacggacaagagccactgccagaccggcaacagcgaacaggtcggcaaggtcactccgaagcccgacaaggtgtgggtgttggactccaacggcgccctgacggccgaggatccgcagcatacgaacgacaagggcagcgacaaccgcacgttcgtgaccggcgacgcgatcggcgccgtggtcaacggccgtatccccgcgcacctgctcaacccgttcacctcctacgcgatcaccgatgattggaccgcttcggcccagtggatcgactggaaccacaaggaccaggtcaaggtgtacgtggacggcaaggacgtgaccgaccagttcgacatcacggtcgacaccgcgaagcacacgaccaccgcgaccgcgaagcagtcgttcctcacgaagaccgcgttcggcaccaaggaccgcaaggtcaaactgtacatcggcggcatcgtcaagcaggttccgaacgcccaggccgcggccgaccagaggaagctgaccaacaaggcctccgagaagtggaacaacgaatcccggccgaccaacgagccgccggtctacgtgcgcaatccgaagcccgacaaggtgtggagcgccgaccagggccaggccgccacggccgaggacacggcgtggagcaacaaggtcaacgcggacacgcacacgttcgtccagcaggatgatttcggcgtgaccgtcaacggcctgctgccgaagaacctcgccaggaagatgagctcctacgaattgggcgatgatttctccaagagcgcgaggaacatcgacctggattccgcgtcggtgaccgtcaccatcgacggcaaggacgcgaacagcctgttcgacgtgcacaagcaggatggcagggtgtggatcaccgcgaaacagccgctgctcgacacgacctacaaccaggcggcggaccgcaaggtgcgcatgaccatcaagggcgcgttcaccaagggcgtgctcaaggccggccagaaggtccagctcaccaacggcgattgggagaaatggaaccagcagaccgtgcccggcaacgagccgcccgtcagggagtggagcccgaacccggacaagagctggatcaagctcggcgatgacggcacctggcaggccgtggtcgatccggacgagacgaacaagaccggagcggacacccagaagttcctcgacggcgaccaggtcgcgtccgtggtcaacggcgtcatcgcgtccgatctcgtcaaggtcaccgacatcaagctgaccgacgattacgccaaggccgactacatctgggatctcacgtccgacaagtcgaagatccgcgtgtacgaggccgacgccacgaccgacgcggcatcctccgtcgcggacatcgcgaacaagggccgtgacgtgaccgaccagttcgacatcaccgtccagggcaccaaggtcaccgcgaccgcgaagccggagtaccgtgccgcgcaggccggattgaagaatccgaagcagatcagcctgctcctgcccggcgtggtgaacttcgccaacggcaagggcgcggcccaggtccgcaaggacttcaggaaggccgcaggcgacgagctcacgttctgcgagaaccccgacggttccaagctgaccaactcgggttccgagaaggtcaacaacgagtcccagccgaccaacgaaccgcacatctgcggctacgtcccaccggtcaagaagaaggtcatcgccgaaggcagccagggcggcgcgaacaacgacgccgacgacaaggtcgtgtatccgggccagaaggtcgaataccgtctcaccacgcagccgaaactgcccgccgacctcggataccggatcgtgtccatccaggacaccgacgtgtacgaccagtacctcgaacccgacccgcagaccctggaggtcaccgacctcgccaccggcggacagctgaccaccagcgacccgcagatgggcgtcgaaggcgactacacggtcgcatgggacaccgcggcgcgcaagttcaccatcacgtactcgaacaagtacgtggccgaacattggaaggccggcacgaacccgcaggtgcaggtccgtttcgaaggcaccgtcgcgaagaacgctcccgtcgaccgcaaggtggacaaccagtgggcgctcacgctgaacaacatgatcaccccgtcgaacatcgtcgacaacctgccgccggtccacaacccctccaagaaggacaaccagtccaaggaacagggcgatccgaccgtcagcatcgacgggaagaccatgctgctgggcgataccggcaactatctggtcaccctcgacctgaagcagaccgacaacgcgtaccgcgtgtggaaggccggcatcaccgacgatttcgatgacgagtacgtcgccatcgacgaatccaagatcgaggtgctcgaccagtccggcaaggacgtgaccggaaagttcaacatccaggtcaaggacggcgtcgcatacgtgtacgcgaagaccgtggacacgtggatcccgaagaagggcgtcaccgtcaagggcgacccccagccgaaggacctcgccaagtattcgaccaacggcaagcatgatccgctcaacgatccggccatcgaccagaacctcctcggccagacctaccaggtcgtcatgccgtacaaggtcgtcaaggtcaaggatgggtacacggtcaggaacaaggccatccaggtcaccaacgacacgaccgtggagaccaacgaggtgtccaacccgctcaagcccgtcaacccggccaaggacgtgaccgtcaaggtcggcggcgaaagcatcgacggcagaagcgtgtacaaggaccgcaccttcctctaccagctcgacagctccgtcatcccggccgaccgcgcctacccgcaggtcagccagtggaagatcgtggatccgctgaacaccgagttcgaccagtacacgggccagtgggccgtgtacgcgacccgcgacctgtacagggacggcaaggtgctcgccgccaagggcgacaagctcgccggcaacggcttcgacagctcgaagctcggcggcgaactgttcaccaccacggccgacgccaacggccaggtcaccgtcgaggcgaccgaagcgtaccgtgccctcgtgtccgcggacaacgcgcatgagaacggctggcgcgcgtacatccagtgcaagcgcctgaaggtgtccgaacgcgtcgagaaccagttcaccgaacagttcaacgacaaggagttccagtccaacatcgtgtggacccgcaccccggacatgaccccgtcgatccacatcgagaagtacgacgtggcctccggcgaacaggccggcgaccgcgacgacgtgaaggacgcgttgaagatggccggagacagccagcagatcgcgttcaagatcaccaacacgtccaagacggactcctcgaccggtgagggcgcctggtatctcgccaaggacctgaagatggtcgacaggaccatcgccggcgaaggcgaggttgtggacctgaagtatccggacgattgggacaccctcgtgctcaagcccggcgagtccaccatcatcaccggcacgttgaagggcgtcgggcagggcggcaagcacaccgaccgtgtgaaggtcaccggcacgccgctcgtcgaatgccccgtcaccgaccagttcggagaccagcagcccaaggacggcgaccagaccggcgacggcaagaccgacgccgacacgaaggtcgacggcgacgcgtccgacacgacaggcctcaagcaggtcaaggtcggcgacaggaccctgtgcgaggacaccaccgtggactcgaacaccgacgactggagcggctaccgcgaagatctcgccaagaccggcatggccatcggcggcgtcctgctgtccctcatcgccttcggcggtgtcggcgtgaccctcttgggcgcacgtcgcaggacctcgaccgtcaagcacggcgtgcatgccgccaaatgatccgatgaccgttcggatccgccatacggcatgagtgacgccacgggcgggatgttggaggattctccaacatcccgcccttttcctttcccggaccgtggatgccgtacaaggccggcgtggctcgtccgaaagaacgtcccacgcccccatccatcttattggggtgccacccgttcgaatatctgcgctcatacggccatgtgcacgtgggaatggttgagagatccggcaaccggccggcgatccgaaagcggacgccgacgatatcggacttccacggcagcgtgagccgtccgtgcagaaaacagaagaatccctatcaaaggagacatccagtatggatatgaagaagatctcagccgcgtgcgcgaccgccgccgcgttggccgcgttgtgcgtcccgggctcggcgttcgcggccgacggcacgctcaccctgaacgcgggcgacggcagcaccctcgccggacacagcttcaccgtgtacaaggtcgctggatacaacgacgtcgtcaagcgttgaacaagaacggcgtgacctacaacacgtccgaaggccgtaacgccgccgaacagctcctgcggttgaagaccaattcggacacgctgcgcaaggtcgccggcaccctgcagtccaccgccgcgtccagcaaggtggcggccgtgaagaccaaccagacctccgccacgggcagtctgaacctgaccctgccggagggctattatctcgtcgtcgacgcccagggaatcccgatcctcgtgtccaccacgatcggcggcagcgtcaggatgagcaacggccagaccctcggttccacccagatcaagaccaacgtcaccaagatcgacaagaagatcaagagcgtggacggcacgtggaaggattccgcggccgcgaccaacggcgagacccgtgacttcaaggccacgttcaccgtgccgaacaagctggccgtggacaccatcaccctcgaggaccacatgaccggcatcgtatacgtggacggttcgttccacgcgaccacgtcgtccggcacggacgtgaccaaccagttcggcaccatcggcaaggacaaggtcggcaattccgacggcaccggcttcaaggtcaccagcctgcagagcttcgtggacacctaccagggcaagcaggtgaccgtgacctaccagggcaaggtcgtcaacgcgtccaaggccaaccagggcctcaaccagatcctgatcacctcgaactggctgcccaacgtggtcccgtcggacgtgccgaccccggggccgggcaccgatgagaccccggtcccgacctacgacgtgaatctgaagaagatcagcgcggccgacggcaacaaggtcatccagggcgccaagttcaagctccacaacgacagcctgaaccagtggtacgtgtggaacacgggttcgaaccagtggacgttcaccacggatgagtccaaagccaccgaattctccacgaacgcgtccggcgtgatcaacttcacccgtctgggcgccggcacgtacaccgtgaaggagacccaggtgccgaccggctacttcagcttcgtcaagccgagcttcaccctcaagatcaccgatgacgggcacgtgaccatcaccggcaaggaccagccgggactgaccggcacggtcaacaacgcggacggcaagaccaccaccccgaccgccgtggtgaagaacatcgacaacatcacccagctgccgcagaccggcgcgaccaccatgggcgtcatgctggtcggcgcgttcgcgatcatcctcgtggccaccgcgtccggcttcgccgcctaccgagtccgccacgagaacctgggcgacggtccggccatcgcctgatttttccgaatcgtccccggcctcgaaagcgaaggttcggggatccaggagccgggatcgtgcggccttttctcctgtcagccgcacgatcccggccctcttccaaaaaatacggaactcgcatatgaatcacaaaggatgagggaaatgggattccttacaagacttctcgccggtctcacggcggccgcggcgttgggcgccggcctggccggcacggcaaacgcggtggacgtgaccggcgcggccggaaccacgaaaagcgtcgtgaagctcacggccgatgacacgaacaacctgccggaccatatcgtcaacggcagcttcgactatccatccgtgccgtcatggacggggttggcggggtcgtcttcgaacaaaaacaacaagggcaagctgttcgccaccatcaatcccggtaccggcaaatacggttcgggatgcgccatgtccaccacaggcagggccattcccaattggaacaggtcgagtttcgcctggaactccacccagggagacgcgcattatcccggtatgagctgcgaggccggcaatgtggaactcaattacgattccgtccgccacaaccagttcgccgaactgaccgccgaccagcagggcaccgcgatctaccaggacgtgaaggtcacgccgggcaccatgatgacatggagcctgaagcattccagcgcgaccagcgcctacgtggacaagatgcaggtcatgatcggcgaaccatacaaggagaccgcgcaggaggccacccgcatcgcgtccgagaacggcaacaaggtcggtgagaagatgaccaccatctcaaccccgaccacgtccgaccgtgcggacaacaagaagtgggatacgtactccggcacgtatctcgtgcccgacggggtcaccacggtacgtttcaccttcaaatccgtcgcgtccgcggaatggtattccggcaatgatctggacgacatcgaattctcccgttcctacaagttgacttacgacaagaactcttcggatgccgccggcgaggttccgtcgaaccagcgcggcaaggagaacaccacccagcccgccaagaccaagaccaacggaaccgtcaagaccgtcgcggataccaacgccagcctgccggaccatctggtcaacggcgacttcagcgtgaactaccacgaccagtggaaggacagcttcggcggctggaccagcatcgacccgaacgcgggcaagaccctgcacgccaccagccttcccaatggctccagctggaagtggaccgccatcaacgggtgggacaagtccaagttcggctggaccagcacccagaaggccggaagcaacgtccagcagaaggccaacgcggtcgaactccagtacgacgactccaccgccgacaacgtgtacgcggagctctgcgcctacgaggccggcacagccatctaccaggacatcaggaccgtgcccggcaccctgtacaaggtgcggttgaagcacgccagcctcaacagcacgtacctcgacaagatgcaggtcatgatcggcacgcccggccacgagcagcccgtcgagatgacccgcaccagcgtcaacgggcacggcgacaaactcaacgagaagtccacgaccatcgccaccaaggtcacgaacggcaacaaccgccaccacgccgaccagtgggagacctacgagggcacctacctgatccccgacgggcagaccacgacccgcttcacgttcaagagcatcgactccaagcagctcgactacggcaacgtgctcgacgacatcgtgttcgacaaggcatacaagctcacctatgacaagaactcgaccgatgcgtccggcgaggttccgtcgaaccagcgcggcagggagaacaccacccagcccgccaaggacaagacctccggcactgtgagactcgcgtctgacgacgatgtggtggaatacgccgccaacggcttgccgaagcagatcatgaacggtgatttcgaccatgattggcggaacatcgtcggccagtccaggatgagcgcgaaatacaatttcgcgaacatcgacccggcgcacggcgacgtggaggtcagcggcgcgttgaacggcaagggcgaggcgtccaagcagtgggtgcacctcaacgggttcgacgcgagcaagttcggctggaaatccaaccagaccgacaccagggtcgacggcaggggcggcatcgtcgagatccaacggtcccgtgcgaacgacaacatgtacgcggagatcaccgcctcgcaggccaacacgtacctgtatcaggacatcgacaccgcgcacgattatccgaccgtgtacacggtgaagctccggtacgcgcacaggagcggaaccatcaactccaatgagaagatccagatcctcgtcggagcgcccggccatgagcagccggtggagatgacccgcatcgcgtccgaccggggcaacaggctgggtgagaagtccaccacggtgaacgctccgaacacggatggctggctcggctcgtgggacacgttccagggttcggtcgtggttcccgccggtcggaacgtcagcaggttcacgttcaaggcgttgggttccatcgacggcatctccggcaatctgatcgacgacgtgcagttcaagctcgcctacaagctctcctacgacaagaattcgcaggacgccttcggccaggtcccgtccgacgagaccgcgaacaccgtcaagcaggccaaggcgaaggccacgggaaccgtgaggaccgtggcggacaggaccgcttccggtctgacggtgcatgacctcgaaacggatgatgtccccggcgactaccgccagttcgtgctcaacaccaccgacacgaggctctcgcaggtcgagttcgagaacggcgcgtggtacaagtccacggactcctcgtcccagggcatgtggccgttgaaggcgggcgcctcgttgaccatcccgtccgtgggcgactggaccgacccgtccggcaggacccaccagatcagcatgaccatgcggttgaaggactggaacggcggcagtgtcagcgaactgtaccggttcgacgggcacgggaacatcgtcggcgacggaagattctggatcaacacggcctacggttccggctattccagcctgcccgcgaaggtcgaacaggccatgggcggggtcgacacgtcgaaacgcgtgggctgctcgtggaccgtcgagttcacgtacgcggacaccggcgagaaggtgcctgacacgttcaagggcgtgaccggcttcaacgacctcgacggttgggacgcgcaatccgatctcaagttcgagggcgtgcagctgcttgacggtttcgatggcgcgtacaagcgttccgacgcggaactcggcacgtacggtacgaacggtttcgcgggcatcggacatgatgcgggcgacgaggcgcatctgaacgcgccgcagcagtcccgtcaccgtctcgcggccacatggacgggaagcacgttcacgttctcctatgatctgagcaatcccgccggccgtaccgacggttcgcgcatgacgttcggcgcgcccgtcacccgcaccgcggtgctcacctatgacaagaacgcggcggatgcttccggccaagtcccgtcgaacacgacgccggacacgacgcagacggcgtcctccaagtcaaccggcaaggtgtccgacctcgtgcagcgcaccaccacgcatgaggacggcagcgtgaccgtcaagaccatcgacacgagcacggacgtggtgtccggctgccaggtctactatccggccggccagcgcatcaccctggcgaccatggcgaaggacgacgactgctgggattccagcatgctgtcgcgtccgggccacacccagctgggttggaaccaggaccggaacgcgacccaggcgcaggcccaggtcacgatggtcgagggcggcatgaccgtgtacgcggtgtgggtcggcaacccggtcctcacctacgacacgaacaagccgagcacatggtcgggccagatgccgtccaccccggcgtccgtatccgtggcttacaacacggccgccgcggacggctccggctgggccgcgggcgacacgtcgaagatcaggggatacaagttcctcggctggtacacagccccgcaggacaacacgggcctctaccagtgggccacgcccctgaccggcaacgtcaccgtgtacgcgcactggcagcggttgcaggccaacgtggtctacaacgcgaacggcggcaccggttcgcatccgaacacgaccggctggcagtattcggatgtgaccattcccggtgacacgtccaagtcgttcaaacgcgacaagtacgtgttcaagggttggggcactaaacccggtaaggcggacgtcgtctataaggacggcagcaaggtcgcattgcaggacaaggacatcaccctgtacgcacaatggcaggaggttcacgagaacttcgtcgaaacgggcggtatcggcctgccgatcgccatcgcgggcggcgtcctgctgctcatgttcggcatcggctcgaccgtcatgctcaccagacgcatgaacggccacggcatgccggacgacgagtgaccggaacccggtgacggaagggccggcggacggccatccaccaactccattcggacgtgggcggaatggtccggacgccggcccttcccgttgcccatccccgtcgatattcgtggaacggatcgtggcaaaggtatggacgttatggattgggattggatcatcgagggcgaacgtgcttcggagggacgtcgcatgcggcgcctgcaccgcatacgcgcacggcatgcgagacgcgtgttccgcgcactcatcgccgtcacggtcgtgttctgcctggcgggcgtgggcacgttcgcttggcttggcgtggaacaggccggagcggcccgcagggcggccgaatcgtccgccctggccgcgaaggacgaccattccgccgagaagtacgcgcgcatggtcgccgcggcccgcgagtacaaccggaggctcgccgccacgccgcatgtcatcggagagacgtccggcaaggacgggaccatcgatggtgatttcgggttcaaatcggacacggaataccagaacctgctggatttcggcgacgggatcatggcgaccatcgagatcccgtccatcggcgtggacctgcccgtccggcacggggccgacgcgtacgcgttggagaacggtgcgggacaccttcacggcaccagcctgcccgtcggcgggcaaagcacccacagtgtgatcaccggacatacgggagtggccgacaaggccctgttcacccggctcaccgaattgaggaagggtgacgtgttctacgtgagggtcgcagcccagaccctcgcctacaaggtcgaacgcatccgcaaggtcgatccggacgatctgcgcgacgtgcgcatccagccgggacgcgacctggtgacgctggtcacctgcactccgatcttcctgaacacgtatcggctgctcgtcacgggcgaacgcgtgagcatgccggacgacgcgccctatcccgaggacgcgcccaggaccaccggccgtgacgcgcgcccgctgctcgtgtccggtgtggcattgctcgcgggcatgcccgtggcgatggtcgagtccaggccacgcgtccgtccgtacggacgtcacggcatgaaacggtagacgcccacacgccggcaccgcctcatgcgggggtagactggtgggtatgcgcgccatatgcctccgcgaccgcgacacgccgatggcgccgatatcggattgggggcacgtggaatggttgtcggaaacgtcgcagggatgtttccattggagccacgaccccgatacggggcatggcattggagggagaattatgaacaagaaggctttcgcaacggccgtcgcatccgtggccgtcgcgggcaccatcgccgcgccggcaatggccgacgagaccgcgaccaccccggtcgaacaggcccagcaggccgtcgagcaggcccagcaggccgtcgagcaggcccagcaggccgtcgaccaggccgcggcccagccgaccacgcagccccagcaggacccggtcgccgcggcccagcaggccgtcacggacgcgaagaccagcctcgaccaggccgcggtcggcacccagcaggcccagcagcaggtccagcaggcccagaccggcgtgcagcaggcccagcagaacgtgcagcaggcgcaacagcaggtcgagaccaccatcaacaacgatccgaacgtggccgccgcccagacgggcgtcaaccaggcacagaccaacctcgacaaggcccacgacagcctcgccgccgcgaaggacaaggccgaccagagcgcgaagaacgccgagaccatcaagaaggccatgaacgacagccagtccatccgtgacgacgccgccaaggccaaggaacaggccgaccaggccgtgaaggacgcgcagcggaaggtcgactcgaccgacaagaccaagctcgaccagaccaccgccgcgaagcaggacgcgctcggcaaagcccagacgaaggccgaccaggcatccgccgccgcgcagcaggcccagcagaaggctgaccaggcgaagagcctgctcgacgaggccacccgcatcgcgggcgacgcgaacgatcccgccaagatccaggaggcgcaggacaaggccaagcaggccgaccaggccgtgaaggacgctaagaccgcgcaggcccaggccaccgtcgccgaggccaccgcgaaatccgaggccgacaagacccgcacccaggccgaccaggcgaaggccgcgctcgacaaggcgaacgacatgaaggacgccgcccaggagaaggccgacaagacctccgccgccctggacaaggccaccgccgcgaagaacacggacgcgaaggccgtgaaggacgcccaggccgccaacgacaaggcgcaggccgcgctcgacaaggccgaccaggccgtgagggacgcgcaggcgcaggccgacaggaccaaggacgagtatgcggccgcgaaggacgcgtacgacaaggcgcaggccgccgcggacgccgcgaagcaggccgcggacgaggccgcgaaggcgcaggccgagggcgcggccggatggttcaagaccaacaaggccgaacaggcgtacaagtatctgaccgacgacagcgtgtcccagtacctggaatacacgcacatcggcgcgaaggacgacgcgaccagcctcgacaacctgctcaaggccctcgacatgatcgacgaatgcaacaagctgcgcgccgaccatggtctggaaccgttgaaggtgtccgagaccgcgatggcgatggccatggtccaggccaactacgcggccaacggccattacaaccacaactaccagtacgacaacgtcggcgagaacctcgactggggcttctccgacgacgatccgtacgacgactggtacacggccgagaaggagacctacgacgcggccgtgaagtccggcgactatccggacctcgccaagctgtccccgtacgacgttttcctgaagtacccggacctgtaccagcaggtcggccactacctcaacatcgtcgacccggagtacatcgccaccggcatggcctacagcggctacggtgagaccaactacgatcacgcgttcacgcaggagtacttcaacgactggaactcctacaacgcgaacgacaccacgttcgatgccagtgtgtaccgcgcgaaggtcgaagcgtacgtcaaccagatcaaatccgcgcaatccacgtacgaggacgcgttgaagcaggtcgaggccgccaagaccgcgctcgacaaggccaacacggcccacgcgtccgccgtcctcacgctcgacaaggccacctcctacctgcaggacgcgcaagacgaatccgcacgcaccacgcagctgctcgccgacgcgacccgcaaggccgcagaaacgcagaccgcgtacgagcaggcgaaatccgccgacgagcaggcgcaggccagcctcaccaccgccgaaaccgaccgccaggccaagcagaccgcgtacgaccaggcgaaatccgccgacgagcaggcgcagacgcgtctcacccaagcccagaccgcgctcgacaaggccaacacggacgtcaagcaggccgaacaggacaagaccgccgccgacacgcgtctcgacgtgctgaccgacgcgaagaacgccctcgccaaggcccagaccgcatacgaccaggccaagagcgaagccgaccaggcccagcaggccaagcagaccgcgcaggacgaactcgcccaagcccagaccgcgtacgagcaggccaagaaggaaagcgacaaggccgcccaacaggtcaaggacctcgaaaacaccaagacggacctcgcggccaggacccaggccctcgccgccgcgcaggccgacctggacgcgaagacccaggcatacgacgccgccaggaacgaggccgacaaggccaagcaggccgaaacggacgccgaaaccgcggtcaggaacgcgcagcaggcgttgaccgacgcgcaggcacgcctcgccaaggccaagagcgacgcgaaggacacggaagccgtcaagaccgcgcaggccaaggtcaaggaagcacaggacgcgctcgaccaggccaagacgatcctcgccaaggcgcaggccgacctcaagcaggcccagacggtcgaagcccaggccaagagcgactacgagaccgcgaaggcagcgctcaagacggcccagcaggccgccaacccgaagcatgacgacaatgccggccagaccagtctgaacgccgcccagcaggccacggtcgaagcggccgccaaggccgacaaggtcatggcatccaccggcgcggacacgaacggcatcatcctcgccgtcgtcgcgttcgccggcatgggcgccgccacgctcgacctgaaacgccgccgcatggacgtgaccgcacgccacggcatgcgctgacccaattccccctccaaacaaacaggcggccggaacaggacgacggaaaaccacatgacggtttcccgaccctgttccggccgtttctctctcaggacccagatccaccacggttcggtaaaataagccaaagaaggagaaaccatgcccaacacgcaactgcgtcaacatatcgacgacatgcccggcatcctcgccaaacttgaacggattccggaaatcaccacccgactggacctcatcgacaccctgcgcgcccacgccctctcactggaaccgttggatggcgtcgaaaccatggcattatccgattacgaccgcgactggctcgtgagatacacctacaattcaaacgccatcgaaggatcgaccctgactcttcaggacacatccctcgtattggaaggcgaattcgtgccctcggattccccggcacgtttcgtgttcgcggcgcgcggcgtcgccgacggcatggcctacgtccgcgaatacgcctccgaaagacgtgaactcgacccggaactgatccaaaggatccacgaggtgaccgcattggacctgcagccgttcgcacgcggcacgttccgtccttacggatatctggcgagaatcaccgcgacccgcgtcaagaccgccgacccgttggagatccatgacgacctgcaagccctgatcgacgggctgaacggaagcgacgcgcacccgttgctcaaggccgcggcgttccatacgatgttcgaaaacatccatccattcatggacggcaacggcaggaccggccggcaactgctcaacctcatgctgttggagaacggataccgtcccgtggcgatcaagcatgacgccggacgtgtttacgcccggggtctcgaatcctggcaggtcgacggtgatcccgaaccgttctgctccatcctgttcgactgcgtggaacaggaggaacgcacgttcatcgaccttgtcgaacggctccgtcatgatccgaaaaccacggacggctccatcgccatggatgctccgggccaggatgtccaaccgccggatccggccgatgttccggacgatcccggcatcggcctggtctgaccctcttcgcaggtcttgacggcttccagcatgagcaagccaacgagaccgcatcccgaacataaccgaacatccgataccatcctacagacggccggaacaggacgacggaaacccatataagggtttcccgaacctgttccggccgtccgtttcccctggaacgtccacatgaacgaaggacatccacgttgctaccatgggaaacgggaagcaatgaatccatccaccataatcgcggggtccgatgctatttgaaatgaaccgtgtcctaatgtgccggaaccatccggtactggaattcgcgtactcatcgaacgcgggtttcatcctcgaagtgggtgacgtgttcgatccgagccgcgtaccggtcggcatgtatgtggacggacagccccgacccgacagtgattcggtgaccgcatggtggcggtcccggggaatccccgccacaagggacggcctgcgcacgctgctcatggccacgggcatcccctccggaaaagaactgctcgaccgttccatgggattgagcctgtccgaccagtactggatccgtcccgccggcatggacacgctgcgttgggaggacctcaacttcttccacaacgatttcgacgaacggctcggcaaggcgttgttcaccggcgactcatcccgtatcggcgacgtgaacacgccggacgtgaccagcgccggagacctgcccaaacggtggatcatccgtgacgacggcgtcaggaccctcatcaaggcgggacggtccggccaggagcccgacaacgagcggatagcgtggaaaacggcccgcctgctcggcatcgaccatgtcgaataccgtgtgggtaagatcaacggggccagggtgtcggcatgcgacgaaatgctttcggatacggaggagctcattcccgccggacagatcatgcggatcttccggaagggaggataccgggaacggcgcgacatctgggtggaggcctgccaacggctcggcgtcgaccgtgacacgatcatgcacgccacggatgatttcctgttcctcgacttcctgctacgcaacacggaccggcattacaacaatttcggtctgatcagggacgtggaatccttcgccatccgtcccgccccgatctacgacagcggagcgggcctgtggaacggcatggatcccgacgccatggacaacggggactaccggacgaaaccgttctggaccgaccaatggggagaggaggacaacgcgtactggcaattgtccctcatcgacgattgggacaggtacgatctcagtgttctggacgacgtgcccgacatcgtccacgaacagctttccaccaaccagcgcctctcccccatgctcatcgaccggatcacgggcctgctgcgtggccggctcccgatcatcaggcatcaaagggacgtcgccgcgccccacatgatcggtttgcatcccgcccatggattggacgatctgtccccaggactccagccgccggatccggccgatattccggacgatcccggcatcggcctggtctgaccctcttcgcaggtcttgacggcttccggcatgatcaagccagcgagaccgcatcccgaacataaccgaacatccgataccatcctacagacggccggaacaggacgacggaaacccatataagggtttcccgaacctgttccggccgttttttcctcccttcgccctcctcgtatccctgcggtccttatgcctcccgtccgacgacgttcgggaacggaaaaggaaaaccggctccacacgccgcatgccctcacaatcacccccgtaacggtatcggacgtggtgcatgtggaaagaacggcacagggaacgagaatccccgatgcaaggagggaacacgatgggcgtaatcatcatcatcgccgtcttctggctcctcggcctgctgatggcatggagcatgtgcgtcgtcgcggcacgcgccgaccggcgtatggaagaaatccgccatacccacacggacacggatatcagccggcccgccgacaccggccacgtggactagcggggacgcctccccggccgacaaggaccgtcgcaacccccgctcccaaaacccaagaaaggatatccaatggagaacacgaacctgaaacgtctcgccgcgatgtgcgcggcggccgcgagcctgtccacactcggactggccggcacggccatggcggtggaaacacccaccaccgccgacaccgccaccgcctccatcacgttgaacgccgcccaaggcaacaccctcacgggccacacgttcgacttctaccggctcggctcgtacggcgacatcaccgcgaacggcggcaaggacgtgaggtccctgaccgtgagcaagatcgacgacgcgtccgacaagtggatcgccgccgccaacaccaaggccggcatcaccgaccttcagggcttcgacgcggccggcgacctggcccacgtcggcaaggacggcgagccgaccggcaccgtgcagggccagctgcgcgaggccgccaaacagctcgccgcatccgcgtccgccagcaagatccaggccgtgaaatccgtggccggcacgggagacaccatgaccgtgtccgacctgccgaatggcctgtacctgatcgtcgactccgacggcgtgcccatgatcgtcggcactccggtccagggcaccaagaccctgaacggcgtgaccctcggcaccctgaccgtgaagtccaagaccaccacgatcgacaagaaggtgtcccgcgaccgtctgaacaagggctcgttcatcgactcgaaggcgggcgacacggaggattccgcctcgttcaccgtgggcgagaccgtggacttcaaatacgtgttcaccctgccgaacatgcaggccgccacccagaccgtcgtcaaggacaccatgtccggcctgacactcgccggcgaccccgcgttctccatcgacggcaagacggtgaccccatccgtcgccaagggcgagaacggcaacgggttcatcgccacgttcgaccaggcgttcatcaaggccaacagcgccaagaaggtgaccgtcacctacaaggctaccgtggccaacgcgaagcgcgccgcccaggcgtccaacaccgcggccatctcgaccacgttctacgacggcacggccgcctccaagaccaccgtcgattcgaacgacaccgccaccgtgagcgcctacgacgtgaacatcaagaagaccaactgggacggcaagcaggcattgcagggcgccggcttcaagatccggaacaaggacaccggcaagtggatgaagcaggatcccaagaccggctcctggacctatgaggacacgcagggcgaagcctcgcagttccttaccggcgagaacggccagctgaacatcgcgggcctcggcgcgggcaactaccacgtcgtcgaatccaaggtcccggacaacatgaccagcctcgtgaccgtcgagttcgacatgaacatcaccgacgccggcaaggtgtccaccagcgccgacacgaacaagctcatcaccggccagcccaccggcgacaacaagtggaccatcaccgtgaggaacatcgacgccctgaccgaactgccgcagaccggcggcctgctcggcaacaccatgatcggcgtggtcgtcatcgccatggccggtggcgtcgcctacctcaccgtccagtccaagcgccgccgcgaggcccacaccctctgacgggaaggcattgactcatgacgcgggaagacgactactggaccatcgtgtcgggcggacgcgccgaggcgcgccgccgccggctcgaacaccgggaccggatcgtctcccgcgtctacacgctgctcgccgtgcagctcctcctcggcggactcgccatcatctgcactcccccactgaaccaatgggtgacggacggcaggctcacggccaccgcacaggccgcccaggtatcggcctccacggccacggacccggccgcgcggctcgaagccgccgacgagtacaaccgccggctcgccgcccaacaggtgcagatcggcgagatcatccgtgcggacggcacacgcgacgcggacttcaaagacgacacggaataccagagcctgctgcggttggacgccacgggcaccatgggcgtgctgtccatccccgcgatcggcgtggaactgcccatccggcacggcaccggcgcggacgtcctggacgacgggctcggccacgtgcacggcacgtcactgcccgtgggcgggaaaaatacgcgcaccgtgatcagcgggcacacgaacatggaaggcaggaccctgttcacccggctcgacgaactcaggaaagaccagacgttcacgatcggcgtgtacggccgggtcctgcactaccgcatcaccagcatccggatcaccagtccgaaagacacggacgccctgcgcatccaaccgggcagggacctcgccacactcgtgacctgcacggacaccggcaacagccgccgcctgctcgtcaccggcgaacgatacacgccaaccccaagcgaaacccgggaaacggactcgaaaaccatacgggacggagccctggcacgctgcggcatcacattcctggccggcctggccgtgacgcgacacgacacggaacgcctctgccggcacaccgatgatgctttccgcccgaaggagcataggagctgaaatgaaacgtctcataagcctgctggccgccttggcatgcctgctgggcgcgttcgtcgcgccgttcgcgtcggccgacgatacgacggccgacgccacgcagctgcccgaccacatcgtcaacggggacttcgaataccagcatgactggttcagggagcatgccgcatatggttggacggcggtgataccctccaccggtctgaactggaacgcccgcacgaagagctatcagcccggcccggatgattggaatgaagcgagattcggctggcatagcacgcaggccgacggcacgaacggcgaacccggcgagcagagggccggtgccgtcgaattgcagggactcacccgcgtcaacaccttggccgagatcgtcgccgcccagcccgacacgagcatctaccaggacatccatgtcacccccggcaacacctaccactggagcctgaagcatcagagcggcttcgcccgccacgtcgatcggatgcaggtgctcatcggcaagcccggcagggagacgccccaacaggcgacgcgcaccaagacgaacggcgggggcgacgggaccggcgacgtgggaaccgacatcgccaccgccaacatcaccgacaaggattcgcgcaactgggagacctacgagggcgactggacctgccccgagggcgtgaccgtggcacggttcactttcaaggacatcgactcggccttatctaacgtcggcaatctggtcgacgacatcggcttcagccaatccacgacattgcgctatgacccgaacggcggaaccggcatgatggcggaccagacggtcggcgtcaacatgcccgcctacacggccacggatggctacaccctcacgggccatggcctcgcctcatggaacaccaaacccgacggcaccggcgactcctacaagccaggtgacgcgatcatcatcaataagccgacgactctgtatgcgcaatgggccgacaccacgcagacggcgatgccggagacgggaggaacattgaccaatcgaaacctgactacgatcctggggggggggggcttgccttctggccctcataccaatcctgtcggcaagacggcgtccgcgccggtaggacaatcccggaaggcggtgtgacatgctgagacacatcacacgccttatcgccggcgtgctcgccgccggactcctgctcgcattggcgccgtccgcgtcggcggccgccacgtacgacatcacccaggtcggggacgcggactgggtcagcgtcacctcgaacggcagggaactgtcgggccagaccaccgcgtcgaacggcctgcaggtgacggcgaccgtccgcctgcgcatcgacgacatcggcgctctccgggagggcgataccgtcctggtcaaggccacggcggcgtccggcagccatttcagacccaacctgttctccaggatgaccctgccgccctcattgctcgacaggcagggaaacgccgtgttcacggtatccaacgccgacggcgacagcaccatattgaagctgacccgtaccggaacgacggcattgggctcctactcctgcgacctggccgcgacgaacaaactgtgggggtggacgcccgaatcgaagtcgtccacatggaggataggcaagtcatccacatacacgtttgcaagctggccccaggccaattcgccgtgcacgtcgaacaacaccggggcttggaatccgaaggtgaaggggaacagtgtcgaggtcaaccaatggttcctcaactgcagcacgatggcctccattgcaagcggttcggacgcatccggttttaaaacggagtcgcaggtcggttgggcgcatgtcatccccaaatcgggccggatcgagaacgtggaggtgcctacctatgaagcgttggttctgagggcgatcgatggcaggacaccgggcggaagggatgatcgtctgagcagattctacctttcatggaggaaggatgtggacatatccacctacgacaaggcggcggcgaacctgcccgtggggtccatcgccgtcttacggcaggaggacggttcatgggacctcgcctacaacatcggctcccgtcttccgggattatccaattcactgaagatgcccgacagttccgaccccacgaccctggagctccagaggaacaccgggaacatgtggcaggtggcgtcaatattcttctgcgtacgcttccgggatgagagcgtccccaacagggtgtcgatcgagacgcgggggacggaatacgcgcttaggagccggaccttgaccacgaagaccatcgaccccgccgtcggccagggccagtccgccatccgatacgatccgaacggtggggacggtgacgcgttcaaaaaggtcggggactccggcaccacggccacgaccgccgaggccggcgtcttcctgcgcaagggccacacgttcgccggctggaacacgaaggccgacggcaccggcaccgcctaccaggcgggcgctggcatcgcgtatccggccgaaggacagaccctgaccctgtacgcccagtgggaggcaaacgcatataagacggagttcagggactggcggggccggaccatcacgtccggcacggccaggtacgggacaacgccgacggtgcccgcgttgtccgacacgacgtggctggccgatccggacatgaacttcgacaacgtggacggatggcgcgacgattggtggcttggttcgcccacattcaccaaggacggcctgacggtcaatagccgcgacaccagggcgaacggcaggaccgtcggtgcgaatgcggccatccatgtcgaggcggatgccgactattcggaggcgaatgccacgaatgccgccaagagctcgggaatcggcttcaacatcaacaacggaagcaattcctatcagggatgggacacctgtccgaatgggcggcaatgcgaagtggacgccgttctcacggccggactcgcatcttcccagacgatcgagccctgggtgcagatagccaataaccaattcaacgactacggcaccgccaccgtccaccacatgcagctgacccaggtggacccgattacgcacaacggcatcgcccgcgacggctacgtgttcaccggctgggacaaggacccatcgaagccggtcgaggaagacgtcgtgtacacggcccaatacaggcccgccgtctacaagatccggttcgacgcgaacggcggcgccggcaccatggccgaacaaagccacacgtacgaccggaagcaggcgttgacggccagcgcgttcacgcgcgagggctaccgtttcaccggctggaacacgcgcggggacggcaagggcaaggcgttcacggacaagcaggccgtatcgaacctacttgcccacgatggcgccgtcggaaccctgtacgcgcaatggcagcgcattcccgagaccgcgctgccccggagtggaggaaccatgacccataatctgacgacaatcctggggggggggcttcttatcctcgccatcccattcatcctcatgcgccggcgcaggctgggctgagccatgcaaggcgggtgatgtgacatgctgagacacgtcgcccgcctgctccatgggctactcgccgtcggcctcctattgggactgacgccgccggcgcacgcggccgcctcgtacgacgtcacccaggtcggcaaggtcacgatccaaagcatcgccgacggcaacggccgtcaactgaacggcacacacgacggtcgggagatcaccggaggcttcacgccgaacgcctatatgatctcaacccgggtgaggtacggcatccatatcgatgacatgtcgagactggccgagggcgacaggatcaccatcaaccagtcaagcaccggccatttcgaggtggccgcgtactccggcggctcggtcgtcaacgaccaggccggcacgcccgtgttctcgatcggctggacccgcgcgcgcgtcaccctcacccggctgccggggagcctgacgggcggcatggacctcacgttcgagtcgaacctttgcaccagctaccgcgattacggcagccgtgagattctatacgccacgtcgagcacctggaccatcggaggcgactcgtacacgttcccgaacacgccgttcgccatgcgggccgccaccggtgggaaggatttcgccgcctccaccgtcatccagcgtctcgccaaccaggtcacgttgcagtcgcacctccactggccgggagcgatcaacgacatgctgaacggcggggccatcacacccgacacttccgacacgatcgtctacgaccacatcacgcccatgggcggcacgatctccgcggtccggttcgggtcgatgctgaaccgttggcccctcgcctacgacaggatccacctgtcggattcgagcgacttcgccgtcacctccgccgaccacgggcatccgaacgacgtgcattcgctggacgaagcgaaacgtctcaagccgggccagtcgtccatcgtgaggaacacggacggctcgtacgacgtggccgccaacctcggctcgttcaccggaccggatgccctcgccgaaaccaccaggacctgggacgggaacacgaacgacatcatcgcgtggctccacaagcaccagtgcacgagcgcctggaccagctaccggtacgacatcgcgtgggccgacccgaaccaggcggacaccgccatggtggagacccacctgtaccgcgccggcaaaacctacacaggcacgctgaccgcggccaacatcgccggcagcacgggacaggccgtcacgaccggcggcgtctcctacgatccgaacggcggcgacggcgccatgaccccgaccattggggaatccggcaccggcgtcaccgccgccgacaacgcgttcacgcgcacgggatacacgttcgccggctggaacaccgccaaggatggcaccggcaccgcccaccagccgggcgacgcattggtcctgaccaagagcgtcgtcgtcctgtacgcgcagtggaagcccatcacctataaggtcaggttcgacggcaacggcgcctcgtccggcacgatggccgacctgaccgtcgcatacgacgcgaaagccgcactgcccgccaaccggtacgccaagtccggcgaaacgttcacaggctggaacaccaaggccgacgggagcggcgcaatgtataggaacagggccgaggtcacgaatctggcatccacgcgggacgcggtcgtcgtcctgtacgcgcaatggacggatgccatgacgacaatgcccgagacgggaggaacaatgaacgaccatcgcatgccgaaaaccatcggggggggggcttgtctcttcggcctcatcctcatcccattcgcgcggcggcgcatgcgccgaagccggtagcatcaaccggaagggcggtgtgacatgctgaggcgcatcgcccgcgggagtattcccgtactggccgcgctgttgggtctgctggccgcgttcgtcgcgccgccggcgtatgcggcggacatcggcgtgcatgatcttgagacagcctcggtgcccgccgagtacaggcagttcgccctgggctccgatggtctcgacttcgactcgatcgaatgggacgacggggcatggatgacataccgtttcaaaggcgccgcataccggtatccggtgaaaccggatgccggcctcaccatccccaacgtgggcaaatggacggacgaggacggggacacgcgtcagatcgacatgcgactttccgcgaaggagggcgacgtcatcgctttccagccccgcaggggccgcctgtggtggcggaccgtgcatacggggaaagaggccggctccatcccatatccagatgaagtgaggagcatctgggggacattcacgcccgccgacggacgatacggcgctaccatgaccgcatccttcacctaccacgacacgggggaatccgtgcccgacacgttcaaaggcgtcgtcggattcaacgacctcgacggccgcgccgaccagcccgacctgctgatggaaggcgtcgaactgctgtccggcttcgatggcgcgtaccgtctgaaggacgccgaactcgcggaatacggcacgaacggcttctccggcatcaaacgggacgcgggcgacgagtccaggatgaacgaaagcccccagatcctccaccggctcaccgccacctggagcggaagctccttcgcattccgctacagcgccataccgccgaaagcggaaccatatatcgacccgtggggcaccttcggcccatccgtcgacgcgggcgacctgcgttggacgctcaacgcgaaagccgtggacaaagagaccgggaccgtgctgaggacatggtccgggacggttctgcgcatcggcgacaagtggagcatccagccaccagagatcggaggataccggtacgcggggcttgcggccggcagcgacgctctttccggaaccgaaacctcgacggggctgaagaaccgtcttgtcgttctcgaatacatgtcgaacccgaccaccatgcccgacacgggaggccacgccagccacctgccattggccatcggaggtctcgccatggtagcggcgatggccttgtccgtgctcgcccaccggcggcgccataatcacttcaatccccctgtctgatatcgtccgcgtgtcatgtggattgtgcggaaccgtacggtcgcatggccggccgattccgggacatgtcctaactagggaggaatccatatggctgcaaccctttgcatcctggtcctgatggtcgtcgccgcctcatgcctgtatgaggcgttcgtgtacatggccgtcaaacagaaaagcaccttcgttggccgtaagaccaaggaaaaggttctcgccatgagccgtaagacccgtcaaggcaaggccgtcctgttcatcgtgctcgccgtcgtctgcttcgtgctgatggtcgtggcgggcgtgctgatggcccatgccggatacaacgtgtgacgtcggaccggctcacatccatgatgggtgggatggttccgtatccacgggattcctcccgcccatcttccgttttttcaaaagaggtgggaatgtccgtcgacgatgaagacgaatacgacggttcggaagcggatggcatggaaccggacggcgatggggccgatccgttcgtgccgatgttggaggacgatgggcacaggctcggccgtcccgcgcggcgtggcgtcggcgtggtgggtttcgttcccgcgccgaccagactgtccattcccgaacttgactggctcatgcgcgtgcgtgacggcgccggtcggtcggtgcgtgtgccggaacaccggtattcgcgttccgaccgcggcgcggtcgaatcggctcgcggacgcctgtattcgatggtgtcgaagcaggtcagccagacgaagagcctgtacaaggcgcggcagcgtgacgaggaaggcatgctcccgttgggttccgcgagcccgttggacatgatcacccgcgatttcaacgaacgtcccctgatcccatggcatcagaccagcacgggacgggcgggagtgctcaccactttcgtggccggttccggcgcgcagctgatcccggggccgccgatcggcatcgacgcgctttcccgcgaattgttccaattcgactgctggggtacgtacgacgcgcacatgaccaccagtcccgacctgttcttcagcggcctgcgcggccagggcaaaagctattgcgcgaagacgatcgccgtgcgcgagatcgggttcggacgcaacatcatcgtccaatccgaccggcagggcgaatggaaggccattgcgcgggccattcccggcgggcaggtcgtctcccccggcaaaggcaattacctgaacccgttcgccatgcccgacatgtcccacctcaaatccgaggaggacaagcgcgcgttgcgccaggaggtcctggccggcaggaaaagcgccatgatggcgttggcggaggcggtgagggaaccggaccgtccgttcccgttggacaaggacatgctgtccctgatcgaccagctcatcgcctcgtacggtatcggtccgatgacgttgcaggccgcggtcaaacgactgtccgactgggattgggtggattccatatactcgcatatccacggcttcgagcattaccgtgatctggcgcgtgagaaggccagcgaggcggcccgcgtgttctcccccatggtcgagggcggcacgatgagcggcatgttcgacaaggagtcgaccatcacgttggatccgaccgcgccgatcatcgtgttcgacacgtccggtcccgtgttccaggatcccacgttgaaacgcgtgtacaccgcggcggtcagctcgtggatcgaccggctgttgcaggcgcgtgacggactgcgtcgcatcatcgtgtgcgaggaggcgtgggatctgctgtcgaacccgcaattggtcgactcgttgcagacgcgccaacggtccgcgggccattggggttgcgcgacctggctgatcgtgcatggcgtcgcggacatgacccaggtgttcaccgccggttccggcctgcgcggcaaggtcgaacagctgatgaatctgatggagacgaagatcatctaccgccagggtggtgagaacatccccctgctgaaccgtctcatccccgatctgagcgaggacgaactcgaccagatcccacgcctggcccaaggctacggcatctggcgcatcggacacgagcatccacgcatgatccttcccatcgccggacccatgtgggcggacgtgttcgacacgtcgagcctgcgcaaggcctcctgaacaatccaatcgaaaggagaaacgaatgtcggaacaccggatcacggcacgccgcggctacgaccgtgaggaactcaacgcggacaaccgcagccaggtcatgggcgtgtggcggaaattcgaatcgtccaagacgggcgaatggctcgcccgccacacgaacctgctggaacggttgagcgacgaggaaagccatctcgtggtccgtgcgggcgcgctcgtatgcgtgctctcgttgatcatgtcgatggtcatgttcctcgccgccaggggcagcatgctcgcctggacgctgctcaccctgcccgtattcgccatcgcgttcctgctcgtcatggtcctgtggatcttctgggacgcgtaccgtgattccgaggaacgcgccgccgactggatctccacccgtccgggcatcgcatcctggcgtcagatcgccgccggctacgggccgcgggccatcaaccgtgacgtggtcccgtccgtactgccgcgcatgctggcggatttcctcgaccggaagccgggcgccatccacccgcgtgcatggcatgccgcctggtatgtgggcaaatcatggaacatggaggtgtggctcggctcggaacgacacatctacgtcctggggccgacccgttccggaaagaccgtgagcgtcgtcatccccgccgtggtcgaggctccgggcttcgtgctcgcgacctccacgcgaggcgacatcatcaaagcgacccgctacttgcgcgaatgcggcgtgaaggaccgcgtccgcggcgcatcgttcggcaatcgcgggccgggaaccacgcacatcttcgatcccgaaggcgtcgcggagaacgatccggacacgcggcacaacatgcgttggacgccattgcagggttgcgacgatccggccgtcgcgatgcgccgcgcgcagaccatggtcgcgatcggcggcatgggaagcggctccaacaaccaggagtggggcgtgagcgccaccatgtacgtgcaggccatgctgtacgcggcggccatcgcggaccgcaccatcaacgactgctaccgttggagcctgtcgccggaggccgcgcaggaggccgccgacctgatccgcaagtacacgccggaacgcgagatggaccgttgggccgcgacgttgaacgccctgccccacgtcgatccacgccagaaaggatcggaatggttcggcgtgaagaacgcgttcagcatcctcgccgacccgaacgtgagggcccgcatgaacctcagcccgtccgacccgcgactgatcgacccgaaacgcatggtcctgcgcggcgacaccgtgtacgtgctgtccaagccacgccgtgacggcggcgtcgccggcaacgcgggcatcttcgtgagcctcctgctcgacacgttccaggaggcatgccaggacctcgctttcgacaaggcctccggctcgcgcggcaagatcgagccccccgcacggttcgtgctcgacgaactgtcgaacatcgaaaaatggcccggcctgcgcaacgccatcacccagggcggcggcaacggctaccagctgatcatcgtggaacagtcccgccagcagatggccgacgagaaggacgggtacggcaaggccgtggaacagaccgtctgggagaactgccatcggatcatgctcaagggcgtgtccgacgacgagacgttgaaatggtggatcagccagatcggcacgcaccaccacacccgccgcgaatcctcctggaatccgggacagggaccattgggtggattgaccacgcgccacgaacgtgaggaatccgtcacccaacaggaactgagcctcctgcccgtcggctacgcgctcgtggaaccattgggccaggcgcccgccctggtgcacatgatcatgttccacgaccgcgactggtggcgcgagggattggaggacctgcgtcccgccgcgggccaggcatggcatgatacggaaggagcgaccgcatgagcgacgacgccgtggacaagttcttcgacgagatggtctcccccgcgtccacgccgacggaatccaccccgccggacgaggccgacaagcccggggaaccagatgcgatcatggacgacgccacgggacgggacgagccggagcatgggccgtccaccccgggtggcgtgacggacggtttggaacggccgtcgttctggaccgacgacatggaacgcgacttccaggaggaagtcaaggccatgttcgacgacatggtgaacaggcagcgtggagaactgtccgtcagggagcaatgcgagcacgcgtacgaacagttgaccgccgccgtgaacggcaaatacaaggagctgaccggcaaggacctgccgtcctccatggcgcgcaacctggaccagcttctcacgcagatcaccatggccccgctcaacgagccggagcatggtccaggcctgtgggccaaactcccgcagaactccctcgccaccatggtcgaggcccgcccgttggacctgaccggctcccccatgcgcatggacatcgatctgatgatgctgcacaccatacgcatgggccggttcctcaccacgcattacacggattgggcgcgcaccctgccatcctgttggatccgccacgacgacgtggtccaggaggtctactcgctcaaatgctacatggacatgatcgtcgcgagcccgaacggcggcctgtacgcgccgacattgcaatcattgatccactcgtcgttggaacgcgtcaagggatacctgtcctcggccgacacgtccagcgcggaccacaagcaccacctgtccacggcggacgaccgcaaacgcgaacaggcgcgatgcgacgagtacaggcattggttcgaacgcgacggcggttggaccggagagcccggcttcgaaccgtcctggcggttcacgaacgcgtccgagggattggacgcggtatgcgatctgatgacacccacccgcgtcgatgacgaggatgatcgggacgacaaggcattgtccgaccaggtcgacaagtggcgcgccggattggaaggcctgcgcggcaactatgccatggaccacaagccggagcatctggccgccgcaaggaatgacgaggaacggatccgtcgcgccctcctggactacacgacccgtgaacggtcgagccgtgaccggctcgaccgtgctgtcacggccgccgtcagactcacgcgcgaccaggaacgctccatgctcatgacggacgaggaccgccgcgccctcgccgatctgatcgaccagggacggagcatcctccgcgaatacggaagcagccagttcgacgacgcctaccagccatgctccatcgacatgcaggacgatctgaccgaacggttgaaccggcttgtggacggtgatccagccaacgtgttcgaccattgcgaccgtatgctcgaccagctcgacgacgtgttcgaacgtggaaaggacggacgatgagcagcgaacagcccagcctgttcgaccagttgacgccgtcggactcgctgcgtgacgatctcgaatggatcgactccctgcaggaagacacgcaggaggacgacaagcccgccaggcaggaacacaagccacgcaaacgccgcggccggaagaacattccaaccgagcacgagcctgaacagcccactcccccgccaccgccggccaagcccgagcatgagcctgaacagcccatgctcatcgtgcccgacatgacccaaacggatgagcccatcccaccggccggattggaggctccgaccaccgtgatcgaaccgcccgacccggaaacgccggatgggagtccagccgaaaccaccgtgatcggaccggaacccgaatccgaaacgaccatccttccggaagaggtgttggaggacgtggccgaccccgacgcgccatccaacgactcgaaggccatgacctgggtcaaacgcggtctgatcatctcgggcgccgccatcgtgctgctcatcatcctcgccctggcgggctcccactcgacggccgtcaaggagaaaaccgcctatgagcgcgtgcaagcgtccatgagccaactggccgcatgcaacggcaaagcgaaaaacacggtcggcgacgccgacaaggccggcgtggacgataaggacgtggacacgctacgtgacctcgtcgcatcgaacggcaaactcatccggtccaaacgcgccggcctgtccatcagcgagtccgaacggctctccaccaaggccgacaaggccacgaaacgaacccgcacactggccggcaaggtcgaccggctcgtcaaagccaagccgttgacggacgcgaggaggaaatgccgggacgcgttggacaaggccgtgaaagcgtcgacggacgcgaaaccatcggatgatgcgacccgcgccgcgaaggccacgttggacaagctgatcggccaggcccgcaagctcgacgcgaaaaccaccgtcgacacgtggaacgacatggcatccaagctcgacaaggcgcgcgggaacctctcccaggcgttggacgcgaaagccaaagccgacgaggaagccaaacggcaggccgaagcgcaggcgcaagcccaacagcaagccccgcaacagcaacagcagacgatgcccgcgccgacgccgcagtaccgccgctcttccggctcaggctccaccagcgtgccgcaaggcaacggcggaggaaccacgaacaacaacaatggcggaacatccaacggcaactccggcggatggtacgtgccaccggaaaccaacgacaacagtctgccgaacaacgactcaagcctctgacaaacgggaaaggagcacaacaatgggaaagaacaaacaccgtcaggcgtccacgcccgaatcgaagaaacaggcggccatctggtgcgcgatcgccatcatcgccatcaccgtcatggtcctggtcgccaacccatggaaacagcagacgtccgcgacgtccacgccgcaatccagccaatccgcgcagacacgatcccacaaacagaacaagaaaaagaagacgacgaaaccgtccggcaccctgcaacagcaggcacaatccatgttcatcggcgacgcggaacagatcgccgacgacgtgcgcgacctgttgaacgcgccggagaactcgaacgtcgacacgctcggcaacctgctgtaccggcacaaccggcaggacctcgccgaagcgacggacctgtacgacgcgatcggacagcagaaggacatcgacacgatccgcagcctcgcacgcgaatggtatccgcaagccatgcaggccggtatcgaggcgagacgagacgacctctcgtccggattggacaacaccgcgcgcgaggtcgccaccatcaaacaggacgacctatccggcacgcaaggctgcggcgatctcaaagccgcgtacgaaaccgcgaaacgactcgtggactccaagtcggatgattacgacgctttgaccaaagcccagcagaatctgaccacggcgatgagcggctgcgcgaccaacctcgatccgacagaccgggagaaagtgttcggccagccgcagggaaccctcaaggaagacaaggagtaggagaacatggttaccacgaacaaccgctcttggaaagcgctactgccacggaacggcggcatcggagtgtgcccgcagatcggcagggtgaagatcccgcccgtctgcccacgttccacgctcaacctcaccggaggcagacgcatcaaaaccgtccgcgcctgctggttcgagggcgacgaggcacgtttcgtctccctcatgccgtcgaccggtcgaatccgcaaggaactggaatcgttgaagggcggcgagacggtcgaattcatcggacgtccctgcgaatggcatgacatgtctggacagaactactacatcgtcatcgtcaccgacatggacgtcatcggaccggaaagctttggaaacatgtccaaagattaaatatggttgggttcgtctccgcgcgcagtgtaagacgaacccaatcttggaatgtcatttattttgggcttttcgcgcttccaaaaactccgaccgtaattgcgcaattgaacgatagtacttgcggtagtggcttgaaaccaattctccatgttctctggtgtcgggaaccggaatccgaatttctcgatatctgttgccaagatcttcgcggttggtctgcatgaacacgactctgctccattgcttgcggaccacatcaaggtccaatgcccatccgagatagaaattatcgaacagtgtttcgctcatcacattcataataagcgtttccttagtgaacactgcccgttcttggccaggtaggagcatggagggctctcctatgttcttcgatgcgcgtgagggagtgacgatgctccatggagagagtccactggtttctccgtgccagaaccgttttgctagtgatagagaaaccatgttcgtgggattgaagttgaccatgcccgcgcgcagatctgataccttcacataaggtacatcgccgtttctcaagtcagcggaaggactgccgtgaccgttcctgatagaaatgattcccgtatcttcaagatcaccgagagttcttgtcaaaaagccttttagatgggtttgaacataccgctcgaactctttgatgctggcccagtcgtagtattggggcacaccaatataggaatcgatgagagacttcggagtggggatgaaacgcgctgtgggagaatctaatccctcaagaagcgttgtcacgtccgagagcaccgtatcgtcgatttcttttgtccgcgtgccttccttggtgacatggtaaagaggcttaccatccttgttgattccgatggtaggggcataggtgatccatgtctcactggtacgggcccaggatggttgcttcagtggcgcgccttctttcgctggcttcttgcgcatgacataaaaattcgttttggctcggcagaaaccctgaaatgcttccatgggaatgttcatcaccgccaacacgtcaaagtgttgatcgacccatttgcggaaccatcggtacgttttggagaagaaatacgtttctggcaggactatgcccaagcgtcctccggatgtgagcaatctgtaggcacgttccataaatacgaggccaagctcggtgtcagagtagttgtcgctagggtatccgccgctggtatgttgacagatactgtatttcgcctgttttgcgtcagtcgcgcgaatcttcagtttctcgccaaacggtggattcgtgagaacgacatcgtatgaaccatcggcttcgctccccaagacgggagacagcatgggaaaatcctgccacttctgttcccgaagcgaatcgccaagaacaatattggtagatccgtccttcgcaccaatcattagcgcgcgagctagtttgacattgatggaatccaagtcaacaccgtaaagattacgatgagcccatgttctgatttcgtcgcgctgttcgtcggatgcgcgtttcagcagagtgttataagtctcaaacaggaatccgccggtaccacaagctgggtctatgactttatcgtggtagtcgatctccatcaatttgacggcagattcaatgatgcgctggggtgtgaaatattgcccttcgccttgtttgacattcgccgaacggaacacttggaacgccgaggacagggtctccggagctgcggacttcaaattgatgccttgaagccagtaaacgacggcatgaatcgtctcatcatcgaatttgatggttttcgttgatgtgtcttcgaagaggaaagggtatttcgccatgtacctttcaaagctcatattgattcttttcgcggtttccgccggtgtcgagcaaacttggaaatcaagaggctcttggggatcttgggccattttgccgttggtgtcagaatccattttcaacagcagcatgttgcacatgttgtccaaccggtcgtcggcgcgagtggatttcgagtcattggcgacgatatggtttaaaaggtcggagaacaaacgattgagacccgctccgctgatgtcgtcatgttcccttaaatccacgtaggtgagcgccttgtctccggggatcaggacgttatcccccggtgccggcaacgttgcttgtcttaccgacttgtaatgcatgtcggcttgcttgtacacaagggatatgctgtttccatcggaccagatgccgagcactgcattgggttcaaggcctagatacgtcgatagctccgatatgccttccttgtggttcggcgctttcgtttcaaccagtgcgagaacatgatcccactcgccgcgatgctggggagaatcaaaaattgccatatcgacgggataaccgttgaagctccggcccgcttcgcgcaaagcgttttccgatgggcttttgggcacacgccactcacgatcatcactgtctggtgaggggcagataatctgatcacgactccacccctttcgaaggagttcccgcaacaggggcaacctcacttcatgatgttctttgaatcttccgctttcgtatgccatgcgttcagtccttaattctcgccgaccactatctcaagaaagatggtaatcgcttcatttattcagattaagcggtccaaatgcgttcaacgcctcgtttctcaattggacaacgagctacatgatggtgttggtcgtgtctgccatattcgcttccgctttcatgatggttacagtgtacctgcatttatatcgtcttcatccgcacgttcaccgaaattacaatagaggatgtgccatgtcaaccggtttagccggtcttacagctcctgacttcgacaagaccgtcgcgcaagaacatcttcgggagaaatttcctagaaaactaccagactgatgacgaccatggtaattatgaagtgcaaagcgtctagacaataggaaaggtgacacattgttcatcggccacaaattaaagaaactacgcagagagaatcttgaccttcgagaacagtgcaaaagtcagaaaagcagactggctaatttggaagctgaagtcagcgcgtacgagcagaagatcgaatgctcgaccacacacgttgccccacttgtcagaatgatagaaaagttatgcgccgattctcggtatgccgaatgggataatcatcccgcggcgatgattctggttcagcagacaagggcctacttcgacacaatcatgttccacaaattggagattcccgagtctaccggcctagaggagaagccggaccgtgaagttcaaaacgtgtcacttgtcaatccagtgcccgatcaaaaaaccgtcgagtctcggagaaaagccgaggcatggcaaaaggtgtatgggaggaactatacagatataggcgaactacctttccctcccatgcaggcagacgatttcgattctggaaaattcgtagaattcagtagcgatgaatacaaatcgatgattattggtgtaaaagcctccgaatcggaacgtattgtcatagacccgggaattgacgcaatatgcaccgagccctggggctatgaaaggctgactgaggataaacgtggattaggtcgagtaatgcacgactattggggaaaatgggacaacatggaatataagttctattggcctttctgcctgactaccgtaggaaaagctggcaaccacagtattgccgtggcatgcctgtaccacgaatcaatactcgcatgcggtgagacgaacatgtatgcagatacatacatggattatagaaaatctgaaatattccatcgtgtgacttctgatggagtctactggttcaaagacgagaagccctactgtatggccagtaacagacagaaagccgccatatggatgattctgcataccattatgggcgcagaatatcccatcaaatataaagggatccagcttaatgagaatgagtagcatcagatatgccattactcgttgaccggccagcattgtgggatgttggttgtggaatgggttatggaacactttttgctggtctaatcagagattttgcataccggaagaatctgtttcataaacggacgttttcgggacgtggacatctccacacaacgcttaagcgcatgttttaccgtgagtcaaactttttattgtctgtacgaccacggaatgcaaaaggccggtgtccgaagacaccggcccagacgctttgccaagggatgggaatgagaccaccccgccgatcctggccatgtttgcagtgcccgaccggtgcttccatactagtcgataccattgctcatgtcgagaaagtcttttttagataaaaatctatatttcaagattaggtacatccattccatgaattccatcaggatcaacgtcgggattcggttccggaagattcgtcgtatcgtgtatcgctctaggaacacgatgcaccttgccatccctgattccgcgaatcattttgacgcgcttcgcgagctggtccctgatggcgtcgagacgttcgggcgcgaacatgcgcatgcgcgacaattcatgcaccgactcgtccggccaatccgacaggacgtccaagtcgaaccggctccagtcctccaccagtctgagctgccgcaaagccgagggcttgccggtcgcggcgtagaacggcttggcgaaccagtctcggccgtccacatcgagctcaccgctccacaggctcgcgcccgtatcgtagatcggggccggacggactacaagggtctcgacgtcacggatcagaccgaagttgttgtagtgccggtcggtgttgcgcatgaggtaatcgaccacgagccaatcgtccgtggcgtcacgcaccgcccgcccgtcggctccgaaaccgatggcggcgcggatccactggtcatgagtgttgaggccgttgacggttttgacggattgaagcacctgccaggcggaaaccagttcctcatggttggaaagcatgtccgcgcaagtgcataccagacggttgccgctacgcgccaaggagtaccggactgacggcacgcccagtcgtgagcagagtttcgaggcgatgacctcgttcatgggctcctggcccgtgcgtcccgatttgacgagcagtctcctgccggtggccttgtcgatcgtccagcgtttgggcagatcgccgccagtggatacgtcgggagcgttgaggctgatgtcatgggatgacgaatacgaggtgagcaggatctcgcccaacgcctcgtcgaagggattatcgaagaagttgatgcccttccattcaaccggatcgtcctcgcgcctgacccagtattggtccgacaggctcagcccgtaggtccggtcgagcagctctccagtagacgctgcgccgagggattcgagcacacggcggataccatcgcgcgtggagggaatggcgcgggacttccaccattcgtcgattcttttggcgtacagcgcgctcttgccgtgcgtggtgaattccaagggcagtcgcatggggtcgaggacctcgcccgaggaacacgcgcggccggattcgggatcgtattcgaacgcaaggaccggatggttcctgcacatgatcaatttgcgtggcatgcttccgttcctttcatactccgtattgaaattggttcattgtagctgtaaaaaccatggtagcgcccgcgataatgcccataaaggctcttccccttcaatcatgaaggattctatcttccatcatcccgatcccactcttccagcaggtaataattacggacaagtgtttcttggtccagattatccatttctcttgcagcgccatcaagctcatcgtatagagagcccagatagcggtccccgcgtttgatggcgtcgacgaggtcgttgatggcttcggcggtgatttcgggaatcgggaatggccagtctttcggcctgcgaatgaatggtatttgttccatatggggcttctttccggtgtggctgcttgatatcgtctcaatcatattcatgtggcgacgtgtaatcctccagttgttgcaggaaccactgtctttcctccagcttccgctggaggtctgcgatatcccgcttctccttttcgacctcctccgacgtccggtctatgatgtcacgcaccgtaagcgtcttgtcatgggaagcggataccgaatcggcccgttccaacgacggaagtgcggcatcgttcccggagatcaacgcccggtcgaccgaatcatcggaggaaacgtgctcggcggtccaaatgaaaccgcagaacacccttgtggcgatcgacgcaattacgagcttgggacgtgccctcgatcgtcccgtctccctacaccagtcggcggcgtctctgacactgtcgaactcacggtcgggcagtccgccgccttttcttttcacgatgcaggctttattgttggctctaacgtgatcaatcatgatgtctcccctatgatccctaggcgagtggcccacggcggatcccattcgcaccggtagacgtggattcgacgaccagcgggcaggctatctccatcacgtagaagaccgcgcagaatcccaggaatgcgaatacagcgggaatccactggccgagacgcgccagtatcaccgccaacggcagtagtccaagaagcagaaggccctgccacacgccttccggactccgaacctccgggaaaacccgcacgatgagagccgctgcgggaaggatggcgaggaatccacccgcgcacaccctgagtgccatggtgggaatcttgatgtcgaggaaacggaacgagccgaaaatgagccaattgaataatccgtatgcaaaatcaaaaaggcagaagcagaacgggatgacctcactggtgtaggcgaggatttcacctgcggcaatgtccgaaaggacgttccagtgtttcgccaagcggcagaagagcagtggtacgacgacgcccatcagacagccacagcagagtcctatcaaatccttcatcattcatcccttccggtggtcttcaatgccttgccgttcgccttgtataggccaaccttgctgcctttgatgcggatcccattcgcaccggtggacatggattcgacgacgatgcggcctccgagtgcgttgacgaccttgacgatggtgcggaagctcggattaccttcctttccgaggcttttgtacaggctctcgcggcccacgccagcctccttggctacctgacccatgccacgcgccttggccacatctccgatggcaacctgcaagagtgttggatcaccggtctccgctgcagcattgaggtatgcaatggcatcatccttgccttcgatgcattcgccggggttccggcggctaatctctaccattgcctctccctgatggtcgattcgggtattctctatgcttttcttacttgcggagctgttcggtctgatggattctcatgcccattattgtatcccagagaatacaataatgcaggtgtggcggtcttcgtcgtattcgctgctatatcggaatgcgcgcgacgtctttgtcgggattgcctgttttcgttatccgatatacagatgggtcgggaagcatccttcccaacccatgttccgtttttacggttactcgagttcgcgacggcgacgagcagacacacgatggcgaccagtgcgttggagtcaaacatgccgaagccgacgaacaggaagatcaaaccccagacgaggctgccgaggttgaatctcgtgttcgtgtcgacgctggcgatgttgcgcaacgggatggtcttggtggacgcgccgagcgggatcagcccgaacagggtgttcggcgccttgtactgcacgcgcgtgctggatgcggcgatggaggttttgagccagaagatgatcacgctcggactgaaacggtctccgacgatgttcttctcgccgggcgcgtaagtgaattcggtcatggtctgtgcggtttcggccatgttcttctcctttttgctttctattgtgttttttcttgccctctctctttctcccgtatgggcgtcggagagagggaacggtctggttggttccgctgtgcggtcctattggcggatgatggcggcggatctgagtttctcgaagtcccgccggctcatgtgtcgtttcgcccgggtccagaattctctgagctccctgccatcggatgccttacgttggtttccgcttgtttcgtttgttctcatggttcaagtcctggattgtccggcccgccggccgtcgcgtcctggtcgatggccggggccggcaatggaacattcgattggatgctggggaattccagaagttcctgtttcggaacggggtttttctccgtatcgacgccgagccggtagattcgttcgaacctcttgcccagataggtgccgtccgtcgtttcctccaaaacggtgcagtgcagtaggtccgggaggaacacctcgctttcgttgggcacgtctcccctgctgccgaccatcggcactccgtgggaggcgccttcgatgacgaggaggattcccccgcccccgagccaatgcggggtggtgaccgtcgtggacaagcccggccccatggtcacctggtctcccacgttgaaatccatcagggcgagatagtcgttcgtttccggggtgccatggttcttgtagcttcccgtggcgagtgtgcgcagcagtctcaaccgtgggtcgagctgtcggacctgatgcagccggtatgcctcctcggcggctttcccgccccatggggtgggtggcagcatgcctttgggattgtcttgcggaacgagacgcatgtatgacatcccatcggtcactccggcttgtttcctgacgttttccctgtacttcggatcggtgtccagggattgttcgaccaggtcgagaatcagttccagggagttggtggaggttgccttgtcggcgatgatgttgacgtcctcgaacagccgttccgtgagacggttcagatcgtatctgtcacgcgacatcgacgttcgttcgtcttcgatctccgcatgcagccggttatgcctgcgcatcttcatgaaggaccatggatgttccggcgtctccgaccgcatttcctcttccaggtccttgatcgtccggtcctgttcagccagacggtcggataagtctttgatggtttctatccgtgatcggatttcctcggcttcggccattttggatggaaatacctttctgttcgttccatccggttcacgtgcgggcatgccgatatcggaaaaggaccggaaaagattggctccctttccggtccttcttccctggatgccgcccgggtggacgtcacatgcacagtcccgacatgcctgtgccaccgttgcacggatcgacacatggatcgggcatcggaacatcggtcgtctccactgtcgcggggaaagagtccgacccggatgggccggattccacggccgcgcgcgcgacctggggttcctgcgactcgtcgaagtggaacgaggcttcggcgagatcggcctgtccgtcctcttcggccggcgtcgggccctttccgtgtttgatttccaggttcatttttgcgatctggtcggtgaggtcgtcgtactccttctggccttcccatggctggttcaacgcgttccacgcgctttccaggctggctttcgcattgccgagtttgacgccgaggctttgcgcggtgttggtgttgttggagatgattcggtcgagctgtctgatgacgctgtcggcgctgttgttgatgtccggcacgctggtgccggcccaatgctcatgctcgcctttcaatcccacgaacgggcggaacacgttgagtccgttgacggccatgttccgtgaagcgaccatgacggtcagaccgcagtattcgcccacttcccgcgtttcgccggggtcgagcccgcgcgcgatgccgacgaggtcgtggatggcctgtctgcggtccgcgatcgggccgttgccaagatcgaggccgcatattccccgggtgagatgccggccgcggatctcgacggcttcgcggaatttcggctcgtcgtccaacgcctcgccgtggagtctttcgagatggtccacggtcggctgcagttgcatgtcgatcttgaaccggatcgatctctgctggtcggcgtgggcgcgtttgagcagtttcatctgggtgagctggttctcgagttccatacgtttggcgatgttcgggtctcctgtggcgatggccttcatgtcggcgaggctgagcaccgtggcgtccacgtcggacgcttcgcgtgacggtgagccggagctcatgatctggctgatgaaccgcgccttgcgctcgaccgtctggaacatgtagctgtcgaacgtgccgacggtgacgtaccggtagtcctgcacgttgtcgaacatgtttccctgccggcggacacggccctggcgttgttcgagttcggccggcttccaagggcagtcgaggtcgtggatggcgaagagcctgtcctgcacgttcgtaccggtgcccagggtgccggtcgaaccgatgagcacgcgcacctcgcccttgcggaccttttcgaacagggcctgtttcctctgcggatccttttcctgcgcggcgaacatgatctcgtcttccggaattcccaggtcgacgagccgtcgtttcagatcggattggatgttccacttgccggacgccgtggtgctcgagtcgcagaacacgagctgtgtggccttctcctcggcatgctcccgccagatctcgtggatcttctcggcgcagacctgcaccttgccgccttccatgggctggatgtccgggtcggacacgtcgagcagcttcggatcgagactgactttcctgccgtcgttcgtgatgttgagcatgttatcgtccgacgggtcaacggctccgtcgcgcaccagctcggcccgttccaccagcgcgtcgacggcctgtttctgcgcttcggtggcttcgaccgcgacggacaccacctcgcagtccggcacgtcgaggtcgagcttgtcggcggtcagcaggtccgcgtagtcgtggaacgtgctcatcagttcgggcaggttgtggaatttcgcgaaccgttgcttgatctggtatccgctgccttccggcttgacctcgacgctttcgacgatgctgccgtacgtgttggcccagctggtgaacgcctccacgccctgcgccttgagcaggtcgggagcgaggtagcgttgcatgttgtacaactcggccatggaattggataccggcgtgccggtcgcgaacacgatgttgcttccatgtcccgcctcgcgcaggtactcgcacttgtcgaacaggtcctcgcatttctgcgcggccgcgacgtccacgccgggcacgctgatcgtggtggcgatggcgaggttcttgtattggtgggcttcgtcgacgaacagcatgtccacgccgaggtcctcgaagtcgatccactccttgctttccccgctgtcgcgcagcgcctggagtttgccgtcgacgcacatgcggtccttctcggcctgtttgacggttttgccgaggttcttctccattttgccgatctcgtccttcagcttcttcgcggagaagtcgttgccgtccgacttcgcggtctcgatgctgtcgagcatctccgccttacgccgttcgaaatacttctcgcggcgttcgggactgacgtgcatgcgttggaacgtgtcctgccggacgatgaccgcgtcccagtcgccggcggcgactttggcccagaagcgtgccgcgcccttgccggtgccgtcggcctccgtcatggacaggatgttcgcgtccgggtagagcgtcagatagtccttcgcccattgttcggtcagatggttcggtacgacgatcatcggcttggtggcccggccgagtcgtttcgcctcgtggcaggcggccacgccggtgaaggtcttgcccgctcccacgacgtgcgcgacgagtgtgccctcctcggattgcaggatcctcgcgacggccttgcgctggtgaggatacaggtcgatgtcggcgctgatgccggggaatgtgagataggagccgtcgtattcgcgcgggtggatgcggttgaaccgttcgttgtacacgttctccagcatgcgggtgcggtccgggtcggtccacacccattccgcgaacgcctgttcgacggtgtggcgcttctggtacagcagcgcggtggcctgcgggtcgcggatccttctcttcccggtcgggtcgttcgggtcgggtttggtgaggttgctggtggtcgcgttgagcgctccggacacgacctcgaacgggttgcgtcccgctccggtgcccagaccgtatttccggatggtttcctcgtcgagtttcgatccgagcgaagcgttgacctgccagttgccggtcgtctcgtcatggctgaccgtaaggctccgcatgccgccgtcggtgatgttgggctgttggccgaggtcgaatgtgtcgatcatgaagtcgcggatcactccggtcgggatccacgccgagccgagtttcgcggtgatgtcgtcgtgggtgagtcgcgcgggcagcgatcgcgcgagtcgttcgtgcagggattgcaggctcttgagacggtccgtgtccgcaggttcggccggatgggagtccatccatgcgttccggcggcttctccactgttccaggccttccatgtcgaccatctcgtccaatggtttgaacgtcttctggtcccatgaattgtagcgtccgtaccgtttctcgatggtcggatggttcaaccggtccacgtccatcgcgtacaggtattcgcaggtttccggatgggcgcgcaggtccttggccaaggcgaggaaatcgcacttggtttccttgtagtagccgtggtcctccacctcccacaggcttggatcggtgatttttctcaacgcgtcgcatgccggacctcgtttgaagccgccggcgttgaggatcgtggcgatgaccttgtcgtcgatggcctcgggatcggccgaaacggccttgtacagcatgcgcatggcactgttggacgctccttcgtcatcgcttgaccagccgttgtcgaagaccgtgtcgaacaggtcgttgcccgtgggttgttgcgcgttccagtttttcccgagcaggtcgactccgggcttgcagtcatccaggaacatggcggcgaaggcccgcctctggccgtgtccgtgttctttgagcacgttggagaaccagggggcttcgaccacggacttgttcgcgtggatcgggtcggtggcgctctgccatgccccggtttgggtgagttccgtccggcatcgttcgacggacacgggcggtgccacgtcctcgagcccgttgtcggcgagccattccctcacgcgcgcatgttcgggctggtcgaccaggtcccggagcagtccgtcgacgtggtcgagttttcctcccacgtcgccggacaggtattcgtccgcgggcaacggcatcccggtgtccggatccataacgatgaggtcgccgagtttttcaatggtttcgatgtcgtcccgggtgtcgagcagtcgtccgatgaggtcgagatccacatgtcccacacggtcgaggctgacggccatcgcgtcgacgggttcatccacgtgttcgggcatcggaggcaccggcgtgacgaccctcttggaaagcatgtctcctttggcttcgaacccgttggggccgatcttctccaaactgtagagctggttgaggctcggatcggagttgttcgggtcgaacacgcgcaggttctctttggaattgagcctgccgtaggatgcgacgaaccggtcgtactccccatcgaggtccctgatgccttggtccacggcggtgtcggtggcgtccgggtctcgttcgatggcgagcaggcgttccgtccggtcgcgtaggcgcagcatggcggccatgcgcgcgtccccgccctttttgacgcgggagtgcgcgggaacgagctgtccgtccatgtcgccgtaccagatgtggtcgttgccgtcgaccgtgtaccgcatggccttttgcacggtcctgtcgggagcgacgatcggctcgttggcgcgttcgccgagtccgtcgtgcaggtcgatgccgtactcttcgagctggctggtgaggatgcgttcgacctgtccgcccaattgggtgatgtcgctggttccggtgacgtcgatctgcggtccgaatggtcccgagccgatggtcatggttccggcgacgtattcgggatggtcgacgaacagtctgttggcggtgacgccgtcccggaattcggtggtgtcctcccattcggcggccgtgtcggccaacggcttgtcgcgtttgcgcaggatcaggatgtcggagaccacttcggtgccggcctggcggccgaacgtctccctgggcagacggcatgcggctacgagttcggccctgcgggagagttcgcggcgcatgttcgacgtgttcttgtcgagcgtgtaccggctggtgagcacggcgacgaggccgccggggcggaccgtgtcgagactgtgccggatgaaccagtcgtggatgacggtgccgtcgatcctgatcgcgtcgctgtatggcacgttgcctatcgcgaggtcgaacgcgtccgtgggcaggccggtccgttccatcctgttgttgatgatgtcgtcgtccgggcacaggtagcgtgcgatgccggcgctgatcgggtcggcatcgatgccggtgaacgcgtaggaggatccggccggagtgctgcggatgaagttgccggttccgcagccgggctccagcaccatgtccgggtgcttcggatcccggccgaaaccggccttgccgagcgcctgccacatcgcgtccgcgacgggccttggcgtgtagaaggcggtgagcgtgctgctgcgcgcgtccgcgtattcggcgtcggtgagcaattcgctaagacgcgtgttgattccgctccatgccggatcggctccatcctcctcgaacgccttctgggcgccgccccatcccgcgtacgcggcgagggcgcggatgtcgtcctcgaccggttcgcggccgctgtcgtcgaggtcgcgcagcacctcgatggcgtgcacgttcgcacgcgcccgttcgagactggatcccgtggcctgcaggtccgggtcgagcagaccgcggtcgatgtgggtcagagggcttcgatcacgttcctgatggcgatctcctcggcctgatgctccgccatcttgagtcccttgagccacggatcccagttgcccggcttcttgaggtgttggtgcgtcttgtcccaatggttgacgtactcggtgatcgtccggccgtagtccttctggacctggtccatgtaggcgtccaacgccggcatcccctgcctcttgagctccttgagctgttccggcatgtgctccgccatgaacaggtacctcatcttcttgatcccggtgtacgggcaatgcgtgatgttcgtcatttcgggtcgtctccttcctcgcatcgttttcttccgtttcgtgggaagcacgcgaattagacacattgtctaatttcgtttcccaattattttgccccccaatatggggattgtcaatttcttccggcatgtcgaagtcgaaggcgagctgttcggcctcgatggtggccgcgaccacgggccgtgaagtttccggaccgtccaagacgtcctccacctcgtcgccatcggacattaccacgccggcgtcggcctcatcgcgtgcgatccggtcgagatcatcgtcggtgaactgctcgcggacctcctgccgagtgccgccctcctgcatgacaatctgggcggcgagctcccgttcaggggaaccgaagtcgatatccggctcatcgtccacgtcttcggaccgcgtcgcatccgccaccgtcctgtccggcgcgtatccgtgctcgcgttccgcggccagtcgggcctccccgctttccatgccgttccgcaggttgagatcgtacgagtcggctatgtccgcgatcgcttcgggtccggctccacgtcggatgagctgggcgacctcgaatcggcctaccttgatgccgaacagctcgatctttttggctatgagctccggcgtggaaaccgttccggcctccataccggaagacggcgcgtcctccgcgcgttccggctccgacgcgtccgttcgcgccggcgtatccgtggatgatgcggcggccgtctccggctcctcggccatgtccgcggcatgttccgtccggtcggccatggccatgacctcttcggccgtcacctggtggtttccgtctttcgtgaccatggtgacgggcagtacgtccagcagtctgtcgatgttctcgcggcgtcgttcccggtcttgtccggctgcccgttccggccgtcctccactggttcctccggcgtcgaggatgtccgagacctgtcgggcggcgtcgtcggacagcagttccaccgttccttccggcatgccatgtccgccggccagtgacgtgaagacgatccgcggaccgtggcccgtctcatgtccgggcttcgtgccggccgttccggaagtatcggcggcggtcgtatcgggcgtgtccgtcgccgtgttgaaggagtcccatgagtccggactatcgaagatgccttcgcggagactcctgagttccgtttccgtggcctccggcccctcgtggaccataccttcatcgtcgaaccagtcgagccggtaggccatgggcgttccgttcgcgtcgcgtgcggccacctcgtatccggcgaactggctcgcgccgttctcgctggttcccgcgtccgtgtcgtgcgcgtcgatgtagccgatgaccgcattctcgaacgccgcgtattggcctgacaatgcggcgtcaagggctgttcccgtattgtcggacaggtctttcatctcccgttcggcctggtcgatccactccgtggtgaaccattcgggacggtcttccggcctgattgtcccgtcgatctcgcggagtttcgcgatctgcgcgtccacgctgccggcccataggtatttctccgcatgtgatgggccgaggaaatagtcgacgtcgtccttgaggcgtccgagcagccgcaggttgaacccgtaggttccgtccgctccgggagatgccgccagggtccgttccgcgttggatgccgcggctttcggaaatccccgtccggcgaggatggtccgtgcctgggtgttgccttccgactgggcgatgaggccaagcatgtccttaccgagttccccggcgtattccgtcgccgccgtgtcgatgagcgtgcgccagttctcatcatcgtcgtcgggcatgctgaggatcattcccacgggagcgtgctccagcatggttctcgcggcctgtcggacgacttcccgccggggcaggtcgaggctgtacctgcggttcatcggattggtgtatgccgtgagaagcccgggtgaggtgatgacccgtctgatggcgttgacttcgctgtccatgtcgaattcgcctgtgccgatcagggcggagaccacgtccgggtggttctccgttttgatcatgtcggacaggcgcgcgcggtcgagcctgccggattcgacggcgttcttcctggatggccaccagtcgcggccgctgagacggtggagcaggtcgtccgaggctttcgtcagcatgcttgccgccagtcggctgtccgtctggttccagcagcacaggtcgatggcgttctggctgagtttgtctgattcgacgagcatctgcagcagtctcgtgttgctttcggtgcgggccatgtcctcgagcagacgtgccggcgtgccggcatagcggatgaccgcctggcggagttccggcagtccgctggccgcgagggtttccagatcgtcctcgtcgaggctggaaaggtccgcatcgtgggtcatttccacgagttcgtccaacgcgttgtagtcgcggttccgccattgcgggtcgagcagatgccgtgcgatctgctgtggggtggaatgttcgcgtgcccaacgcagttcggcccaatcgtcggagcggtagagttcttcgacctgccggctggtgttttcgtcgatcattgtggctgttccttccattcggctcaccgcatgccttccaatgtggggcgtggcttgtcgtccgccgtgtcggccgatgccggattcgggtacgggagcatgtcggagagttgtttcggttttttgttgcttcccatgtacggttcgtccggcaggctgtcgccgtcgaacgcgcgcgcccaggggttcagcgatgcgggtggacgccactcgtccgtcgccggaggctcgggttccttcctccttcgtgttggaatggttctcgccgtgtcgggtgtgttcagttcctcgtccgttccggtcttgtcgtcacgcatgatgtccgtctcctttcacattccgatcccgggtccggtggctggcatggcgccttggtcgatgcctggatccgggtccggcagggcgttcgcgtctgggaaggccgaagcccagggatccccgacctgtgccggttgggtctggctgacggcatccggcatggtggtggagtgagcgtccggcatggatgcccatgggtcgtcggccgctgtggtggaataccggtcctcgatggcctgcaataggcttctgatggccgagaggcggttcggttcatggccgatgtattcggtgatggggccttcggccggttccgtatggttccatttctctccggcgagacgccagagccattcgccgtccgatgccatgatgctgccgaggacctgcccgtcgggtagttccgcgtcggcgcgtctcggaccgttcgcccaggccgggccggatcgcagttccacgtcctcgatggtgaagtccttgccgtcgatgctgagtcttttcacgtcttccattggttgttccttcgttggttttgtttggagttccggcatgtagtcgatgggattgagttggaatgaggagcacagttgcgcgaatgcctcgagggtgacggccgagccttttttgatgcgggtgaacatcgccgggctcacgcctgctttttcggccaatgcggcccaaggcatgccggttttgttccgataccggttgatgtcattgcggaaccgttccatatcgatggatgacatggttggttctcacattccgattccgggatccatgggaccgttgccggagttcgggtcgatgccgggatccggatcgggaatggtcggcccgctggcttggaacaaggcgtccaagtcgacgccggtccacgggtccggtgctttcacgcgtgcggcggaggatcgttcgtccattacgcagacgcggtcagtgaggtcggccggcatgtcgtccgcgtatgcgccgacgcttttcaggatcggcgtacggttgtcccatacgagccggtccgcggtggtctggtccatgcctacccagtcgccgtccttgttgaccctcagataccggtccctgtcggggttccatccgccgtacatggttttctccgcgatttcgccatcggtgagatgctctccgacggtttcgcgggcggtttcggacgggtaggcgcggtagtatccgaggtcgctttccgggtccatgtcatggatggtctcgacgatgtcatgcagcagtccgatgttctccggcgtgcgttcgatgagattatcggcgtccagttcaagggcgatctgcgatgcggcggtggcgcgcgccatgacggcgtccgacgggtcttcgtcgcgggtggtccaataggcgccgtcgttgctggaccataaggcatcggccgcggcatcatgccagtatccggggtcgttccagttcgcggaccattccttgatctcgtcgtcgaagccggtcatgttcgtcatggcgatgtaccggtcgtgttcgattcccggtgggaggaccgagtcgaactggtcttcggtgacccagcggaattggtcgtacccgtcgggcttgtagcaatcctctccgagctggtagcattcctcgccgattccgatcggctcttcgatggcgttgcttcgcgcgaagagcgataaccgttcggtcgcctggtcgcgccatgcttccatccgttccaaggtcgggttttccatgttcgtctcctttccgtcacattccgattccgggacccatgggaccgttgccggagttcgggtcgatgccgggatccggcatgggaagcccagcgtccgaccgttgttccggacggtccggcagtgggacggcccgcatgcgttcgatggcgtcggcggtgagtgattggtcgaattccttggacagtccgggatcggtggcgatcttcgcgagtgtggacgcggtggagaagtcgatgcccggatatctcatgccgagttcccgttgcgtgtagaggatggtccagtcctggatctcctcatgccggtcgaggatgttttcgatggcgtgcgagagagcgtcatggtccaggagggacagttccgaacgttgggttacgtcgaccatgatggtttcctttccgacggggctttcccgtcttcctcctgtccacatgcccccggttttttcgccgccgatatttttttcgaggatgaaaaaccgatatcggttgggatgcgtgtggaagggacgcaccattcgatatcgggaaggaattgaattgcgtcttgtgatcgccgagaaacgttccgtggctttcgccatcgcgcaggcgttgggcgatgtgcggcagggtgatgggtatgtttcggccggaggggcgctcatctcgtgggcgcagggtcatctggtggaattgtcggatccggaggaatacacggacatgccttggtcagcgcgtaagtggacgatggagtcccttcccatcgatccgaaatcatggcgttggcgtttgagcggtgcgaagggcgcggtgcaacgataccgttccctctccgaactgcttcgttccgacaaggtgaccgagctggtcaacgcgtgcgatccggaccgtgagggcgaggccatattccgacgtatcctcatggcctcgaaggtctccaaaccttcactgcgcctgtgggtcgcgtcattggacgagcaggcgatccgcgacgcgtggaaaaggatgcgtccggaatccgattacgatggtctggccgacgcggcggacgccagggcgaaagccgactggctggtcggcatgaacgcgtcgcgcgcccatacgctcgcctggcatcgcagcctgtcgctcggacgcgtgcgcacacccacgttgaacatggtcgtccaacgtgatctcgcgatcgaatcacacaagccgactccgttctggcgtctcgtcgtgccgatggacgggtggacgcttgaaagcgggaagatcgaggaccgggcgtcggccgaccgcgtgctggccgacgccaagggactgcccgtcgatgtcctggaggtaagacggcgccgcgagcatgcgaagccgccgaccctgttcgatctgacgggactgcagaaggccatgagcgaccggcacgggctgaccgccgaacagacgctggactgtctgcagcatttgtacgagatgaaggtagcgacctatccgcgcaccgattccaaatacgtcacccatgatgacgtggacgggttgaaggaactgctacagccgaaatacgcgttgggtttcctggatcagaagcccgtcgacgcgatccacgacctgtattccgccggcggcttcgatccgatgcggtgcgtcgcggacgacaaggtccaaggtcataccgcgatccttccgacgcggcgtctcacctacgacgtgttccagcatgacctgacggacatggaacgcaaggtcatgaccgtgatcctgacgcgcatgtgggccgcctgcgccacggaccgtgtccacgacacggtgaaagtcgatgcggcattggatgaacgtcatgccgatggttccacggaacgggtcgcgttgtccgcgtcgagcgacgtgaccatcgatgcgggttggaccgccattgagcacacgtcgaaaacggacggcgcggagaagaagcccatgaaccggataccggactccctcgggaagggacctctctcccagtccggctcaccttccctcgccgagggcgtttccgcgccaccgaaaccgttcacggaggccacgctgctgtccgccatggagcatgcgagccgtttcgtcgcggacagcgatctgaaagccgccttggatgacgacacgagccattcgggaggcatcggcacgcccgcgacccgcgccggcatcctcgagagcctggtcagaagcggctacctgcagcgtaagggcaagcagatacgcagcaccactgccggacggatgctcgtcggcgtcgccgtagacgagttgaaggatgtgaagctcaccgcgcaatgggagcaaagccttgccgacatcgaacatggcaggggcgacgagacgtccttcctgaacgagatccgcacggcctgcgcggcgatgcccggccgtgtcatggagatgacccagcgcgacagcctgcgacagttggcgcagcaggccggcggacgcgagtcgttcggcccctgcccgcgttgcggcaaacccgtggtcaagaccgggagcgtctggcaatgctcgtcgaacaagagcatgaaggatgacaccggcgcctggaagctcagcgagggatgcggctacaagatcttcgcggagaagttcggcaagaagctcaccgacagcatggtccgccgcacgttggaaggcaagcgtccgaaagtgtccggcctgaaatcgaaggccggcaagacgttcgacgcgcgcctggtgccggacaggcagtacggcatcggattgtcgttcgacgatctgaacaggaaaaggaagtagatcaccgtatgcgcacttcttcaccaccttctctttcgatcacctgcgtcgcgatggacaacgtagggagaatcctgaaggacaggcgcatcagcgtaaacggacttctggccttgatccacgacaggcatcccgattgcggcctgccatacagcattttgcgcaggcttgtctcccatgagcgaaagatgagcatcgatgaggcgatcctgatctgcgacgccgccggaacctggcatacgattggaaatcatgcggatccatcgtcatcttttcgatggagtgttcaccattctcaatcccgctttcaaggatccggctcctctgcgtcgtttcatggaaaggacgcttttcaatccatccattgaattggagaatctgctcaaatcctccagtatggattctcataggttcgggcaatccgaaggctcaaaaggagatataccggtttgattggtttttcgcagattaggctccgctacgttccaaggtggcgtcgctctacttcgacgtttaaacatcactgatgtaccatcaacaactttatagtgttttatatggctttataaggtagtgcccgaaggtttgcgcacttagggtcgtgcccgtccatgggacgatgatcagttcgcttcctgcaggttgtcatcgagccgggacatgtcgaggtagcggcgcgtgctccattcgttcgcggtgacgtacctgattctggcgcagatgagcatcaacgcgctgttgccgtccgggaaactgccgacgacgcgcgtgcgacgccggatctcccggttcagccgttcgatcatgttgttcgtgcggatcctcctgcggtgctccgtcgggaattccggcaaaaggtaggcggtcgtctccccgatgccctcgcgcaggcagccggccgccgccttgagcttcctggactccatctccgcggcgaccgtcccggccttggcgagggcggattcgcgggactccatggcgaatatcgccttcagggccgcggacgcccaatcccggtggttgggcggcaccttcgagagcacgttgcgcatgaagtgcaccatgcaccgctggtacttcgcccggggaagcatcgagttcaccgtggagacgagtcccgcgcaccggtcgccgaccacgaggcgcacgcccttcaaaccgcgttcgatcatgcttcgtatgaactgctcccagctggcagcgtcctccctcatgccctccgtcacgccgatgacctcgcggtggccctccgcgttgacgccgatggcgacgaggacgctgacgttctccacgcttccgccccaggagcgcttgtgccacacgccgtccatgaacacgtacgggtattcggattccaatggccgggtgcgccatcggtcgatgtcgtcatacacgcgcttgagcttgtcggaaagggtctgggatggcatcctgtcaccccacagcagtttgctgatgtcgtcgacctgacgggtgctcactcccgccaggcacatctccatcaacgcctcctcgacgctggactcccgcctgcggtagcgttcgatgaccgcggattcgaagaccgcgcccttgagtttcggcaccctgagctcgagcctgcccgcctttgccgtgagcgtgcgttcgtagtggccggccctgtacgccttgcgcccctccttgcgttcgtatctggcggccccggtgatctcgtcggcctcggcgtcgagcatggcgttgaggatctgggtcatcttctcggtgaccagccggtcgagtttggtctcgaacaggttctggtcgatctgtatgatgttgctgtcgggcatggctgcgcgtcctgctttccaattgcgattctttgtttggcgactgaaaatcgtacacaggacgcgggccatgcccgcttcaacatctcaacgaagaacaaaaccgaaagtgcgcaggaattcggacgttatcctttataaaagcctataatgctttatagatgtttagattgtttatattctaatgggcgaattcattctgcgtgccgcaccatccgacgggcaggcatacgacgggcgtcggttcaatgtcgaatgacgaatggcggtgacttttcccgacaatgcccatcgccgccacgcacgcccatcctctgcacttattctgtaacaaacaacggcttgcgttggagcgcgttctggatgagcgtgcccatgtcggcgaccggcaggtagcgggcgatgatggtccagatgatcgcgacctcgaccaggccgaggatgacggtcaccgttccccaagcgagttgcatccatagtctcggcccggtggccgcccgcccggtcactccggcgatcaccgtgaggatgatgagtgccggcaccaataaggtgatgtcccatccgttgaaccattggcttaccgagacaagccattctacgagagtctcgaggattcctgccatgttgctgtcctttcgttgttgttttccgttgtctgttccacatgcgattcatccatcggaagccgatggaggttctctcgcatcgtttcgagttccttctggtccgcttcccgtcccatgccgtacattgacgcgagcgtgagcagactctgctcgacatcctcgggaagacggtcctcgtgcctgtcggacggatgcgtttcgtagtattcctcgatggtcgtcgagcattgccgcagttcgtcccaagtgggcatgtcatggtccatgggctgcatggttcttttgttctgaatgggttccgcgtccatgaggtccgtggcggttcctccatatgtcatggtgagcgcgtcgaggctttgcctgatggtcggtggcagcagtgagtacgtgtcgtggctgcgttcgtccgcgtccatggcggcccgttccatgtagtattcctccaatcgtcgcatgcggtccctgcggttcgcgtcgatgatttccgcttctcccgttccgtggtcggccaatcgggcgatcctgccgttgatgggatcggtcagcgcgtcaagtgccgattgcgcggcctcgtcgatatggtcgctgtaatcctcgccaaacgtctcgcggcatgcctgggcgatgccgccgacctcgtcgcgtatcctgccgagggtgacgtcgggatcgtatctgccatggatgaagtcgagggccgcctcgtccgcgatgtcggacatacggctgatgaaaccgatgtcccgggagcatcggccgagcagtctgtccccgtcgggcgtgggtttggtgtccattggaatgccggagtccagaagccttccctccacatggacgaccggctccttccgtatcggtgctttttccttgatcggagtcttggccgtgaccgggatgcgggtcccttcccgggtgggtttgggcggcttgaccactccgctggtgtggttgatgcggccgttgaggttggcccaatgctgttcctgtctgccgctttccgcaggaggcctctcccctagcggattgtcggcgtcctccacactccacatggcgcggtagacgacgacgtcgcgcaggagacgcttgtcggagtccccggccgcggcaagtacctggccgacccatgcctgcttggttcggcgtgcctcctgttcgaggctgtcgatcctggtttcgatgagccgttcgttctgccgcaccaggtcgagggccgcgtcatgcttgcgggagcgtatgggaggcaggatgccacccacccaatcgtcgtgcacgctgccgttgacccggtccaacaggttggcgttcaatcgtcccgctatggtcgccgcccagtcgggttccacgggccggtttttctttttcaggtccggatcgtcgttgatgatcccgcgtgcggttttgcgcaacgcttcccattcggggaacatggactggtcgatatcgtcccgggcctgtatatgcgcgtcaagcatggccttgaccgccggcgtgtaccgctcgtccatgctgaaccggctgcggccggggtccagggatggttcctcatggtatgggatgccggtctcgtccatcatgtgccggaccgtttcgatcatgtcggatggcgcgtccatgtcgagcgtgaacgtgccgcctgtttccgtgccggccgcgggcatcatgccgcgtgccgcgtggatggcggcatgttcggccttctccgccgtgagcctgcgtggcttcttctcaaggctttgtctgatgatggcagtggcacgcttcgggtcggtcatgtaggcgcgggaccagactccacggagccattcgaagcttggactgcgtttgatcttgtccacggtcctcgcgtcatgcgtcttgccgagcatggcgagcaggtgggggccggcgatgaggccggccgcgtaatcgtgttcgcgaagcagccgtttcagatcgtaccggtccttgtattcctgttccatggtttcggtcgcggtcatggtctccgtgtgggtcaatagcgagtcgagcatgcggctcatggcgattttcctcgggtcttcttccgcgccggtgagcatgtggtcgatatgacggtcctcttcgcttttgcatccgaacaggaaatggttttcctccttgccacgcgtgccggccacgtactgcagattgcacgccgagttcgagtcagatggaaacagggcggcgcaccggtccacggtcatgccctggctgcggtggacggtggcagcgtagcccgcctcgcaagccttccgcaggacctcctttggaatgttccagacggtgttatcggagaggttcacgcatcgtgcgccggacttgccggtggcgatgatcctgaacgtcatgccgttttcgagcgatcgtccgttctggccgtgtatgtccttcatgttgtctcggcagacgatctggtctccggatcccacgtcgagcccatcgcgcagttggaacagtttgtccgggtcgctttcgcttttgccttgcgcgcgccgttcgaggatgaaccgtttgttgatgtcgcgtacctgcgcgttcgttccggcgatcagcaatgtcgacttgcccatcgactgccatttgatgcacatctggtacgcgtcttcctccacgtccgcgtcctcgccccagtggatgcggtcatgcgccagatattcgtccacgagctgccggcactggttgacgctcgcttcgtccaaccggtcgccgccgtcgcgtagccgtagggtcgcttccggttcaccttcccatctgcggcgggacgcggctccttccggatcgttggcccatttctccgctttggcggtgaaacgccatatgcttgacagtctcgcgcactggtcatgccggtccgcgtagccgagcatgccgcccgcgccggatacggagtcgagctgtttcggatcaccggtgagaaggaccttcgcgccacgcatttctgcgagcctggttatccattgcaggtttctgctgtcgaccatgccggcctcgtccacgatgatcagctggttgggtttgatcgtgttcgacgagtccgtgacatggttggcagtgatgttgatgcgggcgagcagtcgttccaacgggctggtggcgttcctcaacctttgctggagcatgctttccttctgcacggaggccatgatctggtccggatcgttgagggccatcagcatggcgatggtcttgctgtcgcagccgatgctgttgcgtagttcttccacggccttgtggctggtagcgaggccgaggacgcttcccgcgccgtaccgtgcctgccatgcctcggccacggccttcatggtcgtggtttttcccgtgccggccggtccgatgatgctgctgaccagtcgtggattctccaacgcgtacgcggccgcttttttctggtcctctgccagcggatagccgccttgggcttgtttcctttcgttccaccggtcgagccatttctcgccttcgccatgcgcgtagccgacattggcggtcttgttgaatccttcgatcatgtactgttcggcctgaagcacgtccttggtcgtgtatttgtcgaggtccgcgtcgtcgaacacgcttcggcccgagtgcgtggcgaggctcagatcatccatcatgtcttccggcagcttgtaccggtcgggtgtgagtttgacgcattggctaagggccttgtccgcgattgcgttcgccacgatgatccgctgcttggggtctatgcgcacgcctcggagcaggcgttgggcttcggccctcacgttgctgcgggtccatgtggtgtgcgcgtgggtcgtggcctggattgtggcctgggcctgccggtcgaggtattcctcgccgcctccggcgagttgggtgaggtcggcgagctggccgagcaggagtctggccacgtcttcctcgcattcggcgtccacatgcatgagactgcttttatgcgagttcacgtccttcatcatctggtcgagttggatatccggtgcgacttcgccgagcttgtggtaccagtgttcgcgtttggcttgcagggatggttggactgccggtttggctttgcgcgtgttcctccacacttcgagatcgatttgcgccttgcgtttcggaccgacttccttgcctgtctgccgttcctcttctttgattttctcttcgaccagtttggctatttccgcgtgacgtccgctgaaggcgtcgatgagttcctgcggcactccctcgacctcgttgaccacggctttggtgccggtgtcctgtctgagggtccacgaccaaccgaaccgttctgtgagcaggtcctggagcaggttctcatgcacttcgctgatctcgaccaggcttgcgtagatcttccgtccgtccaacgcggtccagaccttgtcggacgaacggcgcacgcggttgctgaggacgacgtgctcgtgtggctgcgggtcgccgtcgcgactgtcgtaatggtcgaacacgaagccggccaccccgtcggccgatacgctggcgacgccgccctggcccgcgcgcgtggtcgcgtattccttttcgaaatattcgatggtcatttccgtggccctgcgcatgcattcgtcgattccgtcacgggtctctttatcgccgaacgcccagaggatgctgatgcttttcggctgtcgtgtggtcaagtcgaatccggcgaccggagcttcgccgttgtctccctcgaccagtttcacgtcgccgaggtattggccgttggacgggttgcgtcgttcgttgatgagctcgcgcacggttttgctggatgccgtggtgccgaccttgccgccgacgagctcggctcctttgccgatccaatagcctggcgggttgcctgttgccgtatagtatgccgttgggtcggcagggttcaacgcgttgtcgccgtcgatcgcctcccgcgcgtcacggagcgggtattcggcgttgctgagtttggtgaggttcattgccatggtttgttcacttgtctccggtgggtatcggccccgtgtatccgaggtgcctgagcatgcgttccgcgtcaccctgcgtgccgtgctggtcgatagcgcgcatgaggttcgcgatgtatccgttcgccgtcgcctgttcgatgagttccggcttgtagctcagaatggttttcagttggaacatgcatgagaaccgactggttttcctggcgcttttgatttccttgtgcgcgttcagggtggattctcgtttcccatcggcccttttccgatagtccccgccttgcttggtcaactggtccaaggccagttccgccgacttgttctttttgaaatcgatcgcgtcctgtttccgctgggcgtacgtctggcggcacgacctgctgcagaatcgtgcggtcggtcctcgtttgggcttgcggatcagtttgccgcagatgggacatattccatcgatcggcccgtatctctcgtccagttcgtgccgtctgcgtttgatctcggacgcccgcatgcgcagtccgatgagctgccggtcttccttctttcccatgaccgatcctcacttgtatgtccacggaccgcgatcgtcggcccatcggcctcccgcgatgttgtcctcgcgccagatatgcttcaacgcggtctcataggtgaccgtcgtctccttgtggtccaggtcgcccgtgtattcgtcctcgagtcgttcgcccggttcgtcaatgcgtcccatgaacgtgcgtggcgctctgccttccggactcacgtccggatcatcgttccaccgtcgcacgccattccaatggacgctgtcggctatcagattcatcccgtccgaaccgatctcggcggacagccaacggaaatcgtccccgtaatcgatggggatcatcggactgatctggaacatcaatatcgcctgacgggtaatctgatagaccatttcgaccaccgtcctgtcatgttcgggcgcgaactcgttgtagtcggcgatctcacgacccaaagattccaaggcgtcccgccggtcgagccacacatccaacagccggtcgtcccgctccttctcaatacgtcgacactcgtcagtcttttccatccgaatcttgcgtttcgaataagccttagcacatttcctatgccatcgccgatactcgcccttccttcccgcctccgtggtcctctgacagacctcgcttttctgtttgaccaacttcccacacaccgggcaacggggatatttcactgccttttccatacccaacccacattcgccacgctcttaattcgccgatatcgggtcaaaaccccggcggcgaattaacagcacccataaaacggcggtattccgccgttttcaggcgtcagccgcgaagccgggtgcaagacgcgcgtggtttctttttggtaggtatagtttttggttttctgctttggttatgggtatggatagttttctgtctgttgttggattgcttgttcttttgttctgcttttggttgtggatggcttctttttctgtgtgttctcttttggcttgcctttcgttttgctttgtttcttgtccgtatatccgttcttatcgctttcccggtatgttccgtatccgttccggagcatggcatgcaaaaagcgccgcggcactcaggtgcagattgtttaccgaatcgattcgccgccaccggcgtgaccggcgcgatatcgatccgatggccggcccagaatcatctccgatatcggacggtcgcatggaagaccatccattcccccggaggatcgatttggtccatttggttcggaaccggcctggccgtccgccgccgcatttcttctcttggaccgatatcgggtccaaatgatccgatatggtccgtctccgatatcggattcgatggatggaagtttccgatatcggagccttgaggtccatgtcgtatcgatggaccatccggtcccgtacttggtcttagaccgatatatcggcaaatgggccgatcccgatatcggttcggataagtggtccaaattgggcctttggcttcattccagcgattcatcgttatttggaccatttgatccatggggtaaatggtccaaatggttctggctcatttattcttttgaaccgatatatcggtaaatggacggaatccgatatcgatgtcggcatcccgcttcgtcgctttttggtccgtcacgtcattgtggtcttgggctgatgaatggccctcgattccgatatcggcagggtctgtttgaccttttgagccggtggcccatcatgtggaccatgcgattcgtcggtgcgcgtaggccgatatcggctttcggaccaccggatgcgactcatttttatgtgttgtatcaatttttgctacaacacttatttttcataccggaagcgtcacttcccatcaaggacgacgcggatctgggcggtgccgttccgttcctccagcacgtccagccgccaggcgtcgccgagcgaggcctcgatctcgctcaggaggaggtcggcggtcatggcgtcgccgctgacgcgctggatggtgacgcgcagttcggccctgcggcgtggttccgtcccgtcaatcgattcataggcctttcgctcttcacgagtggctctgcgcctctcgccccttgccttctcggcttttctgcgagcctcctcttcgtcccattcggcgccggcgttgatgagcgcatggttcgccgtcatgagcgcggttcgcttgtttccgtcgttgaaccattgtcctcgcgtgatcttgcagaacatgagcaaagcacggtcctcgggtgattcgatcttcatcaatgaagagatttcgtcatgggaggattccatggtcggaagttccgggatccgatcggttcctccgatgcgcacatcattggtcctgagttttcccgcatcgcgaataaggccttcgccgaggattcgattgtattcggatacgtatcgccagtcgataggccggccaatgttctcgaaaaggaacatccaggcgcgtttgatgttgttgacgacgatgatgtcgttcacttccatgttcgacggagcgcggccctcaaaaatttcctgtgcgtcggggaaggttattccgtcgacttcgatgttggcggttttccatatggcatcgaccagtagacgtttcgccaactccacggccttcagacggttcccatcatcctttggcatcatgctcctcgttctcgtttccccgcctatcctaacttggatcgatcttctttccggggaaacgattcgggcccatggcgatcggttggatgccatgggcccgaatcgggttcttgcttcagaagctcggttcctgtggttcggcgaaatggtcctggaccacgttgggccatggatcgtctttcgcctcttgggttggttgagcaggttgggtcggctgcgattggggtgccggtggcgtggcagcggattcattggctttggtaatctggaccgtcgcatagcggacggaggtaccgatgtcgtcggcgttgagttcgaagctgctgcgcttctcccccgtctcggtctgccagtcgcgttgcacgaatcgtccggtgacgacgaccctggttcccttgcgaatgccggacgaaatcatgtgatccgccagcggaccgtatgcgacgcagcggatgaacgtcgtctcgccgtcctcccatctgccgttcctctcggtgacgctggtctgcgccacccggaaggcgacgacggtcttgcctccggctgtccgcttgggttcaaggtctttgacgatgttgcccatgatggtcatggggatctggttgattgtcgccatggatcgtcctttctgtttgtggattcggccctttctgggggcttgcccattccacacgtgtcttggttgatatcaggatcggacgagctggagttctccgtctgggaggtttggcgcattcgggacagaggctgtcacacggatagtcgcgatcgatcctccacccctgacgttcgagctcgtccggcgccccactgccggcggcatcgcagtcatgacatttgacatgccagtggcgcggacaatagtgcttgtcttcgatgccgccgacgacctgccacccttcgtcggcggcatcgttatccgcatcctcataggtcgcctcatcgactaaaaggcttgtgtgacattcgtcgcagacgacgtacagctcatggtaataactcattgctcctaatcctcaatcttcgctcttgatttagcggtgaagattaccagcccggtctcggcgtcgaataccttcaccacgcttccgttcagctccagagaaagctgtctggcgtactcggccgcgtccgcgatgtcctggaacgtccggtctgtcccatccaaagaaatgcgatagctcattccatgtcctttccgactgcgtttctggcggcttggagcacacttcgcgcgatttcctcgaaacggttcgggtcgatgaagcatgcggagggaccgaacagtccagggttggccttcagatatttcgccgccgcctcgatttcaacgtctgttacgggcacttttcttccatcgcagtaggcttcgtagactgcgtcgcctaccgtgtagtcttcttcgatgatctggcagcagtcgtaatctcgtgaattttcgtaggcttgcgcctcgtccagtatgatgctcatcgttcgatccactttcctcgcgtggtggcttcacggcagagcgcttggtagatcatctgttcctggattgcgtcggcgagggcgcggtgttcttcggtgtcgccgatgtggtagtcggcgatgaggtcggtcacgcgatgatggcgtttctgcgggttgagctcccagctcatttccttcgtgcacagccaccggcagtcgaatccgcttgccgttggatcgtagacgtgttcggcggcgtcgaggaagctgacgtcgaattcggcgttgtgggcgatgatggtcagcggctttcctgccggccagacctggtcgagccattggtggaagcggagcatcgccgcgcctacggtcggctttccctggagcatttggtcggtgatgccggtgagtccggcgatgaattccggcagcggctgtcgcgggtcgatgagctgttcgaatctcggccggctgttctcgttgccgggctgtacgaggaacgcgccaatctcgatgagtgtggcgccttcctcgggattaagtccggtggtttccgtgtcgagcatgatgtacgtgtcgagcggcttgtcgagtggttcgatgcggcgtggattgtcgcggcggatgtaacggtcccaatacatgaggtttcctttcgattggggtttcggctggcctgatgccttgccgacaacccaattatatcacagtattgtgatattttttggttgtttgctacttttccagggtccagttgccggcctgtccggtttccttgagaccgatcgcctggcgcgccccgtcctgtcttccgtgccggtaggcggcttggctgggtcttgtggctttggagagtttcggcttgtcggagatgaatgtgacgtgggtttcgacccatcggtcgacctggctgccgcgcacggtgatgagctccctgccggtgccgtccgattccatctcacgtcgaaggatctcgtatctgcgggcgatctcttcctggaaaccacgatagtagccgttcctccatgccgcgttggctttcgcacggggtgtggtcctggccctttcgcgccacatggcggcgcggctggtttccatggcggtccagatggattcggtcttgtcgacgtcaacgcgggcgccgtagatccagacagtgctgacgacgtcgcggccgtttccggccctgcggcattcgtaggccgccctgcaccggtttccgtgggccacgatgttcgcgagttgtgccatgtaccggttgcatggattggtttccaatcgtatcctccgttcgatgatctcgacatcgtcgtggtcctcttcgagctgccattcctcgatggcgtgccggtccatgagcctttgggcctgttcgagggctatgcgctgctcgttgtcggatgcggcggggtcgttggctatcgccagcagtctgcgcactcgttccatgattcgttcgacgtctcccatgggactcctttccattctggtttgtcatgaggtgaggaaatgtatggaggcgagtggcgggcacgcccatcgccatagggagaggatgatcgctgtccacatcatcaggaagacgatggttctggtgatgatgaagacgatggtgttggatggcatgatgccggcgttgagcctccatagccaggtgatcggccctccgatgtcccggccgtgccagtagcaggtcatgcgtcggtgcgagcacatccatccgatggtgtcgagcaggatccagatgatgaaggcgcagatgccgagcactcccgtgactggcaggttcttcttctcgctgacggtgacgatcctgcggctgatcttgtcgatcgtcgtgtcggtcgtttccgtgtattcggctggcgtgccgtcggtcttggttgcccagccgtcgagcccgccgtggacgatcagcctgtgggtgacgttgccgccggtcatgatgggccagcaggtctgcagggtcagtccccgttccacgccggccgcgtcctggtcgatgacgtcggtgcgtgattggtcgacgatctcgggattcgagttgatccggtaccggtaccagtaggagcccgtctctatgtaaacgacgtccccgggcttgagcaaccggatgtcggccatgtccgcgtatgtgttgtggccggcgagcgagctgttgccggtctggccgggcatggcggtggtgtcgtagtgcccggcgcccatttcgtcgagcacggtcttggcggtgccttgccagacgggcaggcggtattgtttgccccaggaggggacgcgtaggtatgcgaacagttcaccgtcccccggctccgcctcggcgggcgggtcggtgtggcgcatggtggcggtcttgccgggtgtggccttgtggatcttccggtggctcacctgttcctgccggtggctgacgtaggactggtcgaggctgctggccttcgcgtcgtaggcgaggtaggcgccaaggaagatgacggcgagggcgcagagttccgcgaggatgccgcagatgatgttcatggcttttctcattggtcctcccccgtttgttttccgtcgtcggctgttgcccggcggacggtcgatgcgctgacgtcgaagatctggtcgacggtccggtcgctgaatccggccgacttggcttccaggagcagttgcctgcggtcgcttttcggcagctgcctcattattgatgcttgttggctgaagttgttcctgcagtaggcggcccagcccttcatgccctcgggatagccgaaagcgatccagatgtggccgtcgaaggctttctgcgcggcgtgcacgaagtcgagcatcgattggagcagcttggttctggcttccatgaagttgttccatacctcatccagatcccttggatcctgttgtccgttggccattgtcgtttccttcagttgatggcgaggttgatggtgatggttggcatgtcgatgtcgggcacgcccgctccgggccagtccacgccggcacagcgcatgatctggttgacgcaggtgctgtgcgcgcaggcgagctcccactgccagcattgcgtgttgcacagtccgtagcagcggtcccacatgaggtagccgtcctcgtcgaccgcgggcttgtcgccgttgagcaggtcgcgcagggcgaggacctgggcacggtccttggcttcgaggagggtggatttcctccaggtcatggaggtgacccagccgccgccgtccacgatttcgctgttcttgccgatggtcacggtcaacttgtagttgcacattttttctttcctgccctttgcttttcgttctttccacgggtgtccggcccgatatgggtcggacgtgtcgtcccggtttcagtcggcgagttcctcttcgaggtgcgtgatggcgttgtcggcgtctccccatccagcgtcgcagaagtacttgtattcgcccttggccttcctggtcgtccagtagccttcctcgccatccacgccgtcggcgttcagaacccaccagtattcccgggtgccgttcttttcgactgcgtggaggcagacgtcccagcgtccgcggaggccttggaccttgatgttcttcggttcgtgctgcgattcgtatgcgcagtggttcgtgttcatgctcgtctccttgatgtcctgtcggtccctgaattttttcttttggaccgtttggtcgagcgatagcgttagccgccggaacgtccgcgagcacgccgaaccccttggggttcggtatcgcgtggcgcggacgcgagggcggttacgatccttgccgtaggcaaacggcccaaaagaaaataaaaagggtcgcggcgcgccatgcgccgatccatttccctccggccgggccgcggcctccgtggcgcggtttggccattattgggtccgggaaccggttcccggcgcgtggagtccagaggacgttagccgtcctctggccgccggaggcatccgcccgcgatgtcccgcgggcggattcgggcttgcctgtctaaccgtcgatttgctggcggagtttttctatctctctggagaggatggcgaggaattcccggtaggtgtcaagttcgaccgccatgtcgatggcttcggcctccagttcgaaatggcagtcgccgtcatcggtgaatgtgatgtcggggaagtcgaaccattgccagctgtaaccgtctgggtcgccatgccatccgtctttggttttgacaagcgtgtaatgttccgttccttcgtacttttcggaagtatcggacagcctgcggtccgaattttcgtcgatgtcgctcataatgcggctcctttgattccgccggtttgcaagggaataatccggaggtcggcggaactccctccggcccgccatgtcggcggaatgcgtctctaataggagttggtcgcatggccgatgatgacgcgtggacgatcggtgccgtagcgcaagcggcgtagagaggctcggatccggaatgagagcgcgtacgctcccgcggggatgatgaagatgaggacttcgaccagtccgccgacgagttcggcgcgggatgtagggtccgccatgagttcgttgaatgcttcgagcattgttgtccctttcgttctgggggtttcggctggcctatgccttgccgataacccccattatatcacagtattgtgatattttccggttgtggcttgtctttttcaacggtttccgtgttttttcgcgggtgcgggcatgccgtagacttctcgcaccagtggcccgagggggcggctcgccctgagcagggcgcgcaggtcgttctcttcgatgggtttttcgccgtgcccgtcggtcttgagctcgcggaaggtgcaggtgttgaccccgtcgtggtggacgccgacgtatctcaggtcgtcgtggccgtcgatcttccaggtctcgtattccataccggtccatgggctgtcggagatgatgtcgccgatgttgtcgaacctcacgacgctggcgatggtgcggctgccgttccagagtccggccttgccgaggatgatgacgggatgcgcgagctcgaggtgacgcaggttgtcccgctcgtcggcacggtattcagtgttgaggtcgtccgcggcgatacggacgttcgcgtcgtattcgtcgatggattcgatggcttcgacgagtcgctgcgggaccggcagttcgcactcccccacgacgtatttccatgccttttcgaggatgacgtccacaccgtacgtcgcgtccgccatggtctctttcgggttttcggccatggccgtgacgaggtgcgccgcctcctgcttccagtcgtcgatgatggcgtcgatctggtcggtgtcgttggtccagatgatgttctgctgcatgatgtcgctccttgatgtcctgtcggtccctgaattttttcttttggaccgtttggtcgagcgatagcgttagccgccggaacgtccgcgagcacgccgaaccccttggggttcgacattgcgtggcgcggacgttcaggcggttacgatccttgccgtaggcaaacggcccaaaagaaaatcagagggcgcggcgcaccggtgcgccgctccgtttcccggccccgccgcactaggcatggcggggcatgttccgttgtcgggatcgtcccggagcgatagcggagggtccgtttcccgccggcgagccgtggcctccgtggcacggcgaagccttcctgggtccggggactggttcccggcgcgtggagcccagagggcggtagtcgtcctctggccgccggaggcacccgcccgcgggacatccgcgggcatgaaaaatcccgaccgtttggaagaacgatcgggatttgtttggatgagtccggcgaatggattatttataggcttcgctgcgatggcggatacggaagacctcgacggtgaccacctcgtctcgcagtaggcatagaacacgatagtcgccaatgcggtaacgccattgtcctgacctgttggcggtcaggcccttgcccgtcacccgtgggtcctcgcaaccgtcgatgtgcttgtccatccagtcaaggatgcgtgccgcgttgacgcgtcccatcttgcgtagttcttttcgagcggccgacgtgtactcgacatgccatgtcataacccgaggtcctcacgcagttgcttggatgtgtatcgcgtgccatcatccttttccatggcgtcgttcaatgccgccgcatcgtcggcgtcctcgatgtactcgttcagccattgcgcgaacttgtcatatagggacacgccttccctgcgtgcgatggtttcgcctcgataataggcctcagtgttgatgggcacttccatgttcagaactggcatggcatatctcctttcttgtaataccgattatatcggctggttttttaatgtttcgttgttgttttccgcacggcaaacggaccggggcggatgccccggcgaagggtttcctgtttggaagtcgcctactctttcagtgtgttcagcatggcccggtacatttcatgcatccatgccgtgcgcgcttcgagttccacgccgtcggcggcgagctggctgtcctcttcggcgatgtagtcctcgaacagttcgaagaatgatggcgtgatggcgttcagtccggcctgtctgacggtctcagcgtccttgacggcctgttcgccgtccggttcgatgcctcgcgggcgcatttcgttttcgagccgtttgcgggcgttggcgagcatgtccgcgccgcgcagctcgtcgtatgtgatgccggcatccacgccgggcacgcttccgtcacgttcccaccagatgggcgtgttggaccagatggtcttgatggattcgatgattgattcaaagttcggataatcgtttccatcgtccgggtcgaatcgacgcatatcgtccccgcctttgaagatggtgaggaagtagtcggcgtagccgtcctcgcgttctttcggagtgcttgcgacgatatgcgcgtagtgcatgagtcggccgtattcgtcgaacgtgtagagggtgatgccgtgtcccgcttcgagggcgtcggtttcggtcttcagattaagggtttcgatgcgttccatttccaggttcctttcttcatccggatagatggggccgtcatggttgaacggcccccggtgatggttcaggcctgtgcctgttgtcccgcccacgggtcctgttccgggaccgcgttggtgtattgcggcaggctggtggaattggattgctggcgattggcgcgacgctggttgacgagctggttggggatgatgcgcgtgccgttgatgacggacgtggcctgtggggtgccgtcgcggtcgatccacgtgttgggacggtcggacagttcgccccatgcgaccacggcggttcccttggcgaacacgtcggcttgctgctggatggtctgcgcgtagcgttccgcggccagtccgtagaagttcacgtccacggcggtggtgcgtccgtcctcccactggttcgtctgcgggttgagtttgcggtcggtgtgcatgatgcggaacacgatgcgtgccacgtactgtcccttggggaaatacttcggctcctgagcgaggttgccttcgacgatgttggtggtcttgatggcggtcatgatgttgctccttgggtcttgtgtgggattgctcccgaaaattttttccttgtgaccgtttggtcaagcgaagcgttagccgccggaacgtccgcgagcacgccgaacgtcagttcggtattgcgtggcgcggacgtggagccggttatgatccaaaggctttagccgaacggtcacaaggaaatgctttcggcggcggcgcgcttgtgcgccgctccgtttcccggccccgccgcgcatgggcatggcggggcatggtccgttgtcgggcttgccccgaagcgaagcggagggtccgttgttcccggcgcgggcgcggttccctgccgcgcgtgcgccgtccgggtgggctccggcggctttggggccgaccgccgctggggttcgacgcccctgcggcggattcttgtcagcgtttcaggtcgttgaggttttccactccgatgatttcgacgccgtccggtctcccggcctgtgcgaggtctgcggcggggaggatgacgcagtggacatgcatggcctccgcgtgttcgatgagggctgtcaaatccacgtcctcgccgagtggcgggatggtcccgtccgcggtgacgtcgccgaggatgacggtgttctccaagtcggggatgccgattgtcccggctgtggccattatgcagacggcggtggcgagggcgcataggcccggtcgcttcggctggttggtgggcatgagggccaaggtcgtcctaccttccggccatgcgtatcccactgtttcgcacgccgtttggacgcgttcgcggatgtgccggtcctcgtcgtcgattccgatggccgcgaaatacggcagtcccggggttatgtactctgcggcttggatgaggtacgggtttcccgcgatggtcgttcccatggacagtgttgtcgattgtttcattcctgttcctttcgttcctggtgtcttcacgcgtcggggaaggtcagatagtcgaagccggacagcgagtaatgcgtgtcgtaccgcatggtccccttcatgcgacggggcttcccgtcctcatcctcggccagccggcgcaggtcgtagaccacgcagatgtaagggtcggccgcgttcgggtctgaccattcgcaggcgtcgaagtcggccacctcccagttgtcgcggatggcgagcacggattcctcgccgtccatgaggtcacggcggacgatggccgtgtcgaccaggccgaaacggcccaaatcgttcatggcggcgatgatgcgatgccattgctccgtatcgagtccgtacgtgaaaagtcccgcgggcaggcagtcgtcccaccgccacggggaggtttccgccgcacggagataggcgggattcgcgtacggatgcatgggcggcttggcggcggccttccagttgccccacgcgcagtcgagggcggtgagcagcagcccgtcgatggtctcccttcccgtgccgcaggcatccagccatggggccagttcctcttcggagtgtgcgtggtcggtcagctcatagatggggttcatgatgtcgtcctctccttcgtcagtcgttgtggtcctcatggcatccgtacgctgcttcggccatgtccatggggaaggcgaactcgaacgacgaaagccggaagtacacgcgtccgtcatcgaaatgatgcacgcggtgggcttccgcttctccggagaaacggccctcccccgccaccatgggataggcgcggcagccgcccatgtcgttcggactgccggcataggtcttgcgcaatggtcggatgtacgcggtcttgccgctcggagtgacgcgcgtgacctcgtaatagtcgttgatggacatgtcgctgccccaaccgcaatgcagtatgtcgcccgcggtcagtgtctcccgcttggtcatggtgtccatggtgtgcctccttgaatgaaccggtccctggattttttcttttggaccgtttggtcgagcgttagcgttagccgccgtagcgtccgcgagcacgccgatccttcggggtcggactgcgtggcgcggatgcggaggcggttacgatcattcggcgtagccgaacggtccaaaagaaaagcaggaggcgcggcgcgtcttagcgccgctccgtctcccgaccccgccgcgcatgggcatggcggggcacgttccgttgtcggaatcgtcccggagcgaagcggagggtccgtctcccccggcgcggaacgcgccgggccgggtgggctccggcggcttcaggggccggaaaatgatgggggccggacattccattgacgggaatgtccggcccccattcgatgagcccgcttatcagagtgcgtgccgtccgcgcctttcatcggccttcaggtaggcttcgccatccgttctgacgcctacgacgatgatgaccatggttccttccttgagaaccggcttgtataccactctgattccaaggtccctgaacttgattttgcacagtccggccagatgggcgcgattcgcgttgcgcaacggcttgccgtatccgccctgactggatggtagcggattctcgctgaccttggcgatgcctttgagcacctgtttctgttcggccttgcccagtctgcgcatgtccttcgcggcttcttcgagccattcgacctgccagctcacgccatctccggggtcggcgtgcccgcgatgtcctcttcggtcaggccgagctcggccatcaggtcggcgttggggatggtcgcccgaccattgttgtcctcgatgcgtttttccgcgaggcggacgtcctccgtgtcctcaagacgatcgagaaggtcctgataatcgttgatgcccatcagcacataggacggcttgttgcgtttgatgatgatgacgggcgcacggtcggccttgttcagcacggctgaggtccgcccgttgctgagctcgctgactggcacgaggtcgtcaagcacatccaacgaattgaacatgacaatctccttatctggtatctgtaccatatttaataccattttagcatgtgtgggctcaatccatgcgcgtctgccgtgaatcaggccgattgggagaggtggcggaccgccggaacttccggtggtccgccacggcgttttccgcatcggccgtcactggttcagcagctcatcgatgcggcccagtccgatgacctcgacgccggtggggatggtcgttccggcaaggttcgccgatgggatgatgatgcggcggatttccagcctgcgcacggcatatgcggcgaggtcggttcttggccggcatcctccgatgggaggacgccggcccgtcgcgcggtcagtcgtggaagttgagccaccagaccttcctgccggtgttccgttcgagttcgttcagcaccgctgctgtggtggtgtcgttccacagtccgccgtcgtaccagccttccttgcagatgacgcagagactgcctatggcggttcttgccaaagcgtcctcgcggttgtaccggtcggccagttcacggcatgtgattccctgcaaggcgtcgactccctcccattctccgatttcgtaatagtcgtagaaactgtcctcgttgaacgtggacacggcgtctccgtcctcgttgaggttgagcctgcgatattcggcgtacgccttgagcgcggcctcgtcgtcaagcgcgagtcgtccggcggcggcttttttgaacttttcatgcatggggtcggtgtcgttcccgtggtcctccaagtaggcttggtcgtcggcgcggccgttggcgatgatttcgcttcgggtctccttgacgtattcgtccacgtcggcgtattcgctccattctgcgaggattccatagatgtcgtcctgtttctccgcgatgaccgctccgaggaaatgcatgatgttgctccttgggtcttgtgtgggattgctcccgaaagttttttccttgtgaccgtttggtcgagcgatagcgttagccgtcggagcgttcgcgagcacgccgaaccccttggggttcggtatcgcgtggcgcagacgtggagacggttatgatccaaaggctttagccgaacggccgcaaggaaattctttcggcggcggcgcccggggcgccgctccgtttcccggccccgccgcgcatgggcatggcggggcatgatccgttgtcggaatcgtcccggagcgaagcggagggtccgttgttcccggcgcgtgcgccgtccgggtgggcgccggtccgccgctggggttcgacgcccctgcggcggtttcgtcaatccgaatgggcgtggctcgccgcgtatgttcggcatatgtcccttaccatgtcgtcgatgcgcgcgcagccgatttcgtcggtgacgagaaggatgtcgttgtcaaggtcgagccagtagaccacttcgtcggtgtccacatgccactcagcgaaaatgcagtcgcagaatggttcgacgccacgcggatattccttgcattgggcgtcgtagaccggcgtgtagcgtttcagggtcgcttccgtctgccggatgcttgcttcggcggtgtctttatcgatccatccgtcgcacctgatgtcgtctgactgtatggcgtccctgatttccatgtctttcctccttttccggaatctatggggtttgccgacccgtcacggatggatggcaacccccaatctttttcagaggctgtcgatgaagccgaggatgatgcggcgttcgcattcgacgcactcccattcgccgtccttggtttcgcgcgcgtcattgctgcagatgacgctgccacacgtggagcatcggacggtgcacgcctcgcacatgtgcctgccgcattgtgagcaggtgttgcagcaccagcattggtttccgccgtggatgccgacatggcagtatgtgccgtaccatgcttcgtcctcgtcggcatcatgatggtcggctggttcctcacggtcgtacacccattcgccgttcggacggtcataccatggcttgtcgggcagattgtcggcgtccagcgagatgcaaaggcactgttcgatttcgtcgtatgcgtcgcagaacaggttgtccttgcctgtttcgatgcttccattgccgcattccgcgagcaatgcctcggcgttggagtccgtcgcgcatccgccatgttccttcagaaacgtcttgacctgtccccacgtgtaggtgacagtgcagactacctcatcgtcggaatgcttgatgctgtcgttcatgttcgtgtctccttggattgaatcggtccctgattttttcttttggaccgtttggtcgagcgttagcgttagccgtcggagcgtccgcgagcacgccggatcccttgggggccggaccgcgtggcgcggacgtggaggcggttacgatccttgccgtaggcaaacggtccaaaagaaaacagtggatggcggcgcgcctgtgcgccgctccgtttcccggccccgccgcgcatgggcatggcggggcatgttccgttgtcgggcttgccccgaagcgtcagcggagggtccgttgttcccggccatgcggccggctgatatcggtggccgtacacgtggtatcgtcgagacggtttccctccggagcactcatcctataatttctcaatttgggattaatccgtttttcacggatgttcacgttcaaaaatttccggaggggccgtctttttcccacgtgttagaatccccgatgggatttgttttccgggatggcttctgccgtgcccggtcccgccttttttcggaaacagggagtggagaagagccatggcgttcacttgcatcgaattggagacccgccgtcggcagctcggattgagccagaccgatctgggcgtgtgcatcggtttgctttcgccgaaggatccggctgatccgcggccggtgggccagcatacggtctcccgttgggaggaaggcgtgaatggtcatgacactccgccgtattgggtgcaggactccctgcccgaaatcctggatcgtatcggccaggtacgtgacgcgttatgccggtgggcggtgcctttcctgcgtggattggaaccggatgtggaaggcgtggtgcatgtgccgatgtacaggtccgaccgcgcgttcgcccatgcgttcccgaagatggcgggatggcctgcgagcatttggaatgacgcggtggtccgtgccgcggactcgttggatgatggccgcgactaccagttcgacctgcttcgttgacggatcgaatctcaagaaaaccacatggatttaaaagaggcgtaggaaatgcttgtgacgaacattagcgaattcgatgccggcgaatacatcgagagcgatgaggacgccatcgcgtacttcaacgcgatggccgagaccggcgattctacgctccttcaggcctccctcgacgacatatccaaggcccgcggcgtgatccagattgccgccggggaagccggtgttggacgcgaaaccgaatagggccaaaaagcaaaaacaggcggagatatgtccgtatcgtcagcagttaggcagtggtttaggcgtcattcattgtcttccagcaggtcttcggcgtgtgctcccagcgcgcgggcgaggttggccgcggttttcaggctcatgttggccgtggagtagcgtccggtctcgaattcgctgatcctggattgtctgatgtggctcaattctgcgagttcgacctggctgaggccggcctgtttgcggagttcggcgagtttcgatgttctttttcccatttcatggctccagtagcgtgtggtattggcctacgtagatggttccgtcgtcgatgagcgtgtggatgcgtgcttcgatgacgtcctcgtccacgttttcgagggcgccgtatccttccaattcgccgattcccctgtcgtccacgccttcgccggtatcgccgacgagactgcggatggtcttgcggatgccgtatccgaagccgagcaggcgttcgcgcgcgtagacgaacctgactatcgtcgtgtcgattacctcggtgtcctggacgcttcccttcccgttcttctttttcgtggaatggcttgcctggatggtcgggtcgcagtcctgcacgtacgtgcagtttccgcagttgtcgcagtattcctcgtggtcggtgtcgccgaaatagtcgaggatgacgccgcgaaggcattggtcggtttcgcagtagcggctcatggcgtggagacggtcgaacgcggcctgttgggccttggcgcggcccttcgggtcttcgagcgcgtttcccgcgttgtcggcgaggcggcgcctccagtcggcgaagtcgccgccggtccacagcatgacgcttcgtgctggtttgccgtctcttcccgcgcgtcccgcttcctggtagaacgcttccaggctttcgcaggggccgtcgttgacgacccagcgtacgtcgggcttgtcgacgcccatgccgaacgcggtggtcgcgcagatcacgcgtggcgagccggttaggaatccgtcttggatgcgtgccttctccttgtcggtgaggggcgcgtagaacgcttccgcgtcgatgccggcctcgcgcagggtttcggcgagctcgtcgcagcggcggatggtggtgcagtagacgatgccgcttccctgcttggctttcgcccagttggtgatgaatttcttccgcgcggccggcttgagttcgatcgtgtcgaatcggatgttgggacggtcgaagcccgtgccgagcatgatgggattgtcgagtcccagtgcgtgggcgatttccggcacctgccggcgggtcgcggtcgcggtgaacgcggccactaccgggcgcgtgggcagtccggcgatgaattcgccgatcttgaggtagttcgggcggaagtcgtggccccattggagtacgcagtgggcctcgtccacggcgatcaggtcgatgcgtgtggattggctgaagaacaggaaatcgtctgcgaacaggcgttcgggtgcgacgtagaggatgcggagtcctccgccgtgggccatggcgtagatgctttggcgttgcttcggggtcactccgctatcgatgagggccgcggccactcccctggcctgcaacgcctgcacctggtctcgcatgagggcgcgcaatggggacacgacgagcgcgagatggccttcgcgcatcgcgggaagctggtagcagacgctttttccactgccggtcggcatgacggcgaccaggtcgcggtcgttgaggatggtattgacggcttcgagctggcccgggcggaaggacttgtagccgtaggccttgtcgagctggttgagcgcggcttgggaccagtcgcgcagttcgtcttcgcggatgcgtccggtgtcggtttcgaggatgttgactttcatcatgtgcgggtttccttcttccgtttcgggctcggcctgtgccctcccgacacagaccagtatatcacaatactgtgatatttgttttggattgttttaagtgttgcatcttccggacatgcaacgtttatccgatgctcccgtggaacgttttcccgttatccgcagtcgatgggcctgcgggcgcgtgacgattccatagggaggttcgcatgccgcgtttctacgggttcgatggttccactgggatggatctgcgtccggtcggccagttggaggcggaggatgccgcgcgtcgcgagagggaacgccgccgtcatcccatgcccgtgaccacgcgtatccgtctggtctcccagccgccggagggcctgctgcccttgtccttgttcgacagggtcggactcgccgaccggaaaagcctgtatccgcggagtatggagaccgttccgcccgatcttgcgggattgtatgtggattacatgacccgtgtggcgatgggcactcccgtgcgggtcgcgttccatgttcccttgttgggtgcgcggctggtcggacagggcgaatacgcggagtccctgctgtcccgtgtgacggatttctctcccgcgtcggcacgtgcagcgtgcctgctgcttgatttcgatgcggcgtcgcgtcgtggaccgcagtattggcgtccgcggcgcatggttccggatgatgcgacgtatttcaatctcacgcgtatggtggcccggtcgcgtgcctttttcgacgagtatggtccggtcgtgtgggacggtttcgacttcgagggcgggtatacggaccggatcacgtcgggtagtggcgatttcctcaccgctgacacgttgtgggatttcaaggtgagctcctataggccgaatcccatgtacacgttgcagttgctggtctactggcgtatgggattgcattccgtgcatgacgagtatcggatggtccggcggttgggtttcttcaatccgcggcgcgacgaggtgtggctgttggacgtggaccgtatcgatgatcggcttgttgattggacggaccatgagctgatcggatatccgaaggactaacggcccatgcgccatgctttttaggttcggcgcataggccttgcgtcacgtcggttagttccggtcgatgaaggtcagtatgaagtatcggatgagggtgccggtctcgtccggcgttccggccagtccggacgacttgtcgggttcgattcttccgatcgcagcgtattccagggccttgcgcacgcccatccattgtttcatcgtctccaatgattggaacgtttcggccggcgtgtccgtaaggtagctgcgtaccttcacgttcgtggccccgtcgatccggccggcgttggaggccagcaagcgggtcaccgcccgtgtgtcccgtatcgggatcttccgttgcgtcatgtatgccacgcatctcgtgatcatgcggccgcgggtatcgtcgtccatgtcgagcgtgcttgccggttcaatcatgggatttcttctcgtccatctggctggcgatgtagtcggtgaggtgttggacgcagagtgcgaatcctttgcggttgccgtcgtccttgaggttcggactgtagtagaagtcgccggcgaccaggtcgacggcgatctcgtaatcgtcgctgtcgggtttctcgtcgattcccatgaattccacccatatggcctgcggcaggctgggtacgacgtcttcgggtattcgcggcccggtcaatgtcatgcccatcgcatggcatgccgcccatacggggtcgggattcttggcgacggaagggtccatgaagcattccatgaccgtgttggtcttgtccagcgcggtgatccgtgttcctgcgagggcgagacgtgccgaaggcaccgtacgtcccgcgcatatgccgaaccagagttttccggcatgttcttccatgatcgatcctatttccttccgtgttcgtccagccatgttttgatgcccatcaccacgctgaacaccgcggcgatggcgaggatgagcaggaggatgagccatagccaaccgtattgtggcagtagcgcgcattccgtgcagaccatcagcatcgcgactatgcagacggcgaggatgaccagggatttgattatgttgtcgtcgttccggacgctcattgctgttcctctttcttgatcttggcccgccatcgcgccacgcatcgttctatgcgtttccgtccgatgagttccggtccgactcccgctccacggaaaatgtcaaccggtcgggagcctgcttcgagttccttttcggcgtattcgatgaaggttttgttccaggtgattcttttctcggtgcatgcgtcgatgatgtcgagactgcataggtatttgcgttccggctcgtcgaacggcttaccacgtggacggtcttttgctttcggtctggtcattcctatcatttctgtcctttccgccggaatgagccggctttgttttttagatgtcgagttctccttggatgacggggtggctgccttccggcccatagtcggattcgtccaactgccagaccgtttcctttcctccgttgagtggatgttcctccacaagggtcagtccgcagactccgcaccgcatcagtcttagtttgctttgggtggtgcggccgttgatggtcctcggcctccacaggtggggcctgtattgtttccatcggctgcgttcgtccgtgccggggcatgcctgattctttaacgggttgttgttcccgcacaggaacggcatggtgtcggtccacgtgtccgcccaatagatgtattcgccatcccatttgacgggaaggcgatcgtccgaaagaacgctttccgcgcgtagggtcctttcggtttcttctgccgacgtcctttgggcgttcatggcggagtcatgcctttcccatgcaggcctcggcttggtgttccactccggcgagatatgcctggctgatgatgttcatcgtctggtcgattccgtacatgtcgtttttggctgttaccaggtaacggtcctttatttttcgtgcgtattcgttcgctggttcgatcgcgtcactcaacgcgttggcccagatgcgttcttcttcgctcatttgtcttccttcttgtcgagagcctgttctgcttggatgcagaagtccaatgcatctttccacgcggcgcggtatgcgagggcccatgcctgcgcgggcgattcggtggtgagatgggcttccaatagtgttttgatggcttttcgtttgacgtattcgtcggcgcccgtggtgtcgatctcttccagttgcggtgtcgcctcgttcttccggtcgaggatgagtctgatgccttcgatgatgagactggttgacgtggtacccaacttggcggcgtggtctttgagtttctgcttcagtccgatggggatcatgaagctcgtcatcgacatcgcctcggcttccctgctgtttttcttcatggagaatagtgttccgtccgtgttcatatgacttctttcaatccgctgatttgctggtggatgtcattgagtttccgtactgaggtgttgattatggttctcatggtgaagtcctctttgaccagccggtcggtcatttcgaagttttccctgaccagcctgtcggtcgtccttctcatgaaccacatttcaacggactcgtattcatccgatggagttccgtttcccattactcgtccttgctttggggccgtgcgagtctgtcaaggccttcgacgacggtgagttccgcccatgcgcggttcattgcctgggcgagccgtatggtcgtatggtccttggcttgctcgatgagttgacggtagagtctttcggctgtttcgcatgcttcttcatggctgatgggttccagaacctcttcctcgcgcattggaatgcagagctcgtccatgacctgggcgagccggttgtacgcttcggccagtccgtgcgtgttctcgtcctcgcttatgttctgcagggtgacgttgagttggccggcaaattccacgacctgcgccatcgttgttttcctcatgtcgtttctttccttcctccatgccattgacgaggaccgtgatgaggaggatcggagtgattgcgatcgccatcatgccgcacaacgttcccaccgttcgactgagatgcagtaaacgtgggtcggcgtgtgcggatacggtgactgcgatgtagcaggcgcaattgatggtgaacaggttcatcgcgattatcgcgatgaacctgagtatcgtccgtggacctcgaccgttcctcatcggctttcatccttttgggagtcgatttcctgaaaaggttttgattttgaaggaacgccgtcgggggaattgttagagtctgctgttgttaatgtttcccccgtcggtttccttcattgtttccacgtgtcccgcttacgatatcgggggtaaaaatcgtggtcagaatgttttccaggggtgagggcgtcccatgatgttctggtagtcggcggcgtcgagttcgttttcgaggacggcattgttctcgtggtaggtgtggagtgattttttcatgcggtagcatgccaggcttccggcgcatgagaacgtgacggcgatgacggcggaagcgatgatgatgtcctttcttccgcatacggcgccggtgagcatgacgatgacgcaggtcatgaccgcgacgtacagcaggtcgcgttttcctctggtcttgcgcgcgtcgttgaatgcctgttccgcttcatccctcatgtcggccgcgtcgttgaggtccatgctgttcggacggcatgcgtgtgggtctggttcctttcccatgatcgctcctttttcctgtggatgtcctttctcttgtcacgcccgccccacctgttatcggccgcgccactcagtgatgatgcgtacggcgccgatgtccgccaggggccatccggcacggctgtgtactcgtgttgcccatcgtgacgaacgatgccgcggctcgcatgaatgagaaagccgactatcaggttttgccaccgttggtcacgctgaaattgtttgttattagtcgttcacacttatctgttgtagggctttgatgatcagggagagtttcgcgtccagatccaacagtcggacctccggaaccggagtcggaacggcgtattgcacgccgaggatatgctgcagggtcttgctttccgatgtcatacccactgccatgcgattcactacctgacgttgatgttcctgcactgtccttgtgtaatgacgcatcacgacctcttgggtggagtctccgatgttgtccatcgtttcacggatcgtgccgccgttctgcatgagcagggtcgcatgagtgacacgcaacgtacggaacgtcgctgtcgtgcatcccgcctgttcgcgcgcttgacggaaatgattgcccagggtcgtcggggcgagtggtccctttccccgacgggactggaataaatacgggctggattcgtcttttcgattggcgatatgctcgcggaccaatggcaccagcaggtcaggcaacgggcacacgcgtttggaatgcttcgacttggtcggccctaatcttaattctcccagatcgtgttccccacggcagaccgaatgattcaccatcatggttcgggcttcaagattgaaatcggatactctcaacgcgcatgcctcgccgattctcatgccaccggcccatgcggccaagaggacacttaaccggtcgtattccggcatcgactcgtatagggcggccagttgcgtacccgtcaatggcggcacctcccacgatttgggttccggatcaggtggaatcggtagggtgaacgggttcgacgccagcaatggcattcctgtaccgaacttgtccgagcatgcgagattcatgatggctttcagtctctggcacatgcgggggaacacccactcgccttccgcatgctcgccgaagtaccatttggaaatcacgtccggagtgatttgcttgagcgtcatgccgccgaacacgtcttttaaatggcccacgtccgtccgcagattacgtcttgccgcgccacgtagcgcggtgccatccggttttcgatgcgtatccacataccagtcggcaagttcatcgaatgtcatcgatcccgcttttttccgacgatccctgtcggtcggatgaacccactgttttaaaccacgacggtgcatttcgaccagctcatgttcgccggcaagccatgactcagcatcccgcacactttcaaatgatcgttgcactcggcgtccatccacgggtgacgaatagcgtgcaagccatgcgctgatcgacccgtcggatcgtttccgcgcaacgatcgttccgaatcttcttatccttgtgacttccagatctgggtccgtcatatcaggtccttccacgcattagcgtcggcagggacgcccgattcggggaggattgcaaggccaaggagcacgagcgtcgtcgccattgaaagagcatatgcatctccgggagacgaagccccctcgatgcaaaaaagatagcgcatgacagttgattcggcaaaaccggtcagacctatatgtatggcgtttttttggaaccttaaaatgcatctgaaacggcacctgggaataaaaagccggaagggaatatgttgtggcgtcttcgtctgttcccttccggtctctctagagtgcagaagcgttctgttatatggtctttcctggtacttcattcgtcttgggaaccagtgacatccaccaaagaagcaacataagtagcatgagatctttcgagtccaggtgggggagcaaaaaggactatgtctagggggctattccgaccccctagacatgaccggtccgagtccacctattcgtactggcaccctctcggatacggctcgtccgaatccatcgcctacgaccgaaatcttgccgtgcggacggccttttcttcgtgatttgcttgattccacggtgcaaggcggcaataggttgtgttgagccaatggattagcgattattcacagattgtgcattgattgcgcctaccgtatgattcgcagtgttgcagatgacggggattagcctaccgtttcggacaatctccgtgcgaacagcggaaggcgcaagacgcgcaaatgctcgatttcttcgctcatggtacgcggcggatggcgtttggagctgaccagtctgcgcatggcgtccatcgcttcttctggatgtgcatcgaacacggaggtaaggaaaacatccggcgattgagcgtgcagtccgtacctggaaagttcgtctgcggggaaatccttgaggttgaatgtaacgatggtttccgcaccggcccgacgggcggccgcgaccacatgcccgtcgttggggtccgacaaattcacgtccggttcaaaccgctcccaatcctccgccatggccatcggaaaggccctgcagatcgcgtcaagaaaaccgcgggcccggacgtcgggcacatgccgcacttccatgatggccaagcgtgcctcgtccatgaccctcgcagaccatgctggctcgcacagaccagcctcggccaagctaagcagtgggtcgatgatccacgtaggtacgaacaggttggcgtcaagcagcgcaatcataagggcactctacttatcgaaccgggacaggtaatccgaatagtcgatgtcgtacgcgccgtcctcatcggcgatggaacgcatctcatccaacgccttggatgtggcctcgtcgcgcctgcgcttgtagtcggtcacatccgaaagcctcaggaaacggtaactgcgctcccccatgcgggtgtacggaatcatgcccgcgtccagcatgcgtgtgagcgtgcgttgggagaccccaagaatacgcgccgcctcgccagtcgtgatacgctcgtcatccgccaccgcccgttccggctctgcaagcagaaactccctaacgcgcctgtagtcgtccggcgtcaacgggatacgcgtgccgtccaccccttgcaggaacgctccgggaactccgccagcagagcgccgtgccttagacctcgtcctatggactttgccacccatcatcatggtcatcgcaaccacctccatctgttttcatcatgcggcaaatggacacaatggacaatatgtggatcgggataatctagactgctttcaggttcaccgcggccaccttgaccgatacttctccttcttcggcgaatcctcgtcgccgtcggcaatcgcggtttcggaggtcttgccgtttcagtagctccagttgttccaatgcaggctcgctcggtccgcgttgtagccgaacggaatcatgacgaaccgttttcgcgagcggcgagaacggcattgcgaagatccctcgaccctgccaccccatggatcgtccctcgcttggcatgcgcaggtatcgaagactcgccagatccgtacagcatcattgccttgcgattccggcgaaacgtcaaatcggccatgagcggccaaaacctcttgacgcaaaaaacaacgccgccttataatcagcccatactgccgatagatcgaatcgtctgcaaccgaatcgagaggaggcgaaatcatgtatgacgagattccgagtctgctgtatgtcgccggagctttaatcaccgtgctttcatggactcttttcgcattctcgaaaaccatccgtccagaaggtcgaagagccttcatcctgtgcctctccgttatctggatattgttctttgcgagttcgacactggcactcgtgccatatccgcttttcgaggcgtactcaggattcatggatcccgatgtcctcgatttctatgaccagccggtcatacggctattgccggcggtgacctgcggagtgaacctgtgcgtgtcggcaggctgttccatggttcttgtaggcaagcgttcgaagcgataggccttcgctccggatgccgacggaaggtcaatccccactggtgcagaaaaaggccgagtccgtccacgtcgagaccgacagaaatccattggtctttccattcaaaacgacgcaaagtctgccgttcgcgttgagaccggcagacgagccgcacttcttctgcttgaaacgacgcaaaccgggctgccagcgttgaaatcaacagaaaaccgttgacttttctgctcgaaacgacgataaagctaccatttgcatcgaaaccagcagaacaatcgcaattcatccgcccattccgacgcaaacatgaacttttccgtcggaatgggcagaacaatcgcacttcatctacccaaaactacgctgcggcaggctgcgcaacagaatatatgaccgttttttattctttctttaagatgaaccgatgagtctacaatagaaatggcgattgcggcatgacgtacgcatactttcctgcctatagtgaaggcacaacagaaaaacaacagaagatacagagacaagaaaacaacgaagcgacgagccgcgcgacgcagaagaagacaagagcaagaagacaggcggccgtccgaaaggaaacaccatgaagaacgacaccttcaaccagatcatcaacgccaacctcgcctccatcgacccgggcttcggccagttcgcactcgccaaggcctcctccgacctgatgaagaaggtcctcaacaagtaaggctttccgattccaacgaatcacatggcgggctgccgtggttcccaacggaccacggcagcccgtttttcgtatgagggttccagtccggattgccaccgggcccgacgcccgcatccgggaatcctacggccattgagttttccggtcgaacggccccctcagcctccggccggtgcggcatgggtttgcccaacgcgccgaccgcatacaccgacgtatgccgacgatggcgggttccagtccgtcattccggccgcttcagcggcgtggcggcggccgcgtctaccgcagtggtcgtgggcggccgcctgggctatcgggcatatgaggaccacaggacggccatggcgcgcggaacgtgcgtgtcggcggccgccgatctggacagggccgccaaagagtgtaggaatccgctcggcgcggacgcgacaaagtcggcaagaccctcgagcatcatacagatcgaccggaacctgctcgagaccaagctcgaccgcctggtcgccgagaaggtcaccgaaccattgaacgcgatgcccggcgcttcaggccgacgagatcgccaacgccgccagatacgagcgcgccggggagcggaaggtgtaccgcgccggccactacgaccggagcctgaccgccaaggccggcaggctcggcctgaaggtgcccaagctcaagggcgaggtcttcgaatccgcggtcatcgagcgccacagacggcgcgaggaaagcgtcgacccgccgctatctcgacaggtcccggctcgatgacaaactcgcggaagcgaactgatcatcgtgccatggacggccatggtccaaagtgcacatcttttcgggcactaccgagaaggtcccagctttacagggggtattaatgacctttatctcacgggcggcgcgctatgtgctcagaaaacgagtgcgcaccgcggtgctgttcattgtgctgaccatcataacggcgagtatgctgtccgcgaccgcggtttctcaggcagctcaacatgaggccggacagattgagaaacaggcggtcggcggattcgtgctggccagcaacctgcaaggcagcatgctgacgcctcgcggaggcggaatggtccgtcccgccgatgtgcaacgaatctcgaagctgtccggggttggctcgtgcatggtcaggcagaacgccaccgccgatctcgtgggagccagcgtggtgaaggtccccggcggcgatgattacgatgcggagaaagaacagcagttcggcaatacggccaacgtcataggcacaaacgattcgtcaaaactcaatgtgttcacgtcccacacgctcggcatggtcgaaggacgtcatctaaagacgtccgataagcatatgtcgatggtccatgaggatctcgccaaaaccaatgggcttaaagtcggcgataccctcacgctcaaggccaatccatatgatgccgacaatgagtcgcattcgacggcgactgtcaaaaccaccatcgtcggaatattcaaaggggacagcgacagaaaggtatccagccgcgcggaactcacctccaacactgtgtacaccgatttggacactacaagtactctgtaccagtacaaggccggcaaggaaatataccaggatgccactttcgttctggacaggggtgtcgacgtggagaaaaccatggaagcggcgaagaagcttccggtggattggaacaactaccagatcacgcgcaatgaccaatatacgtcgagcatgctgaatgccgcccgaagtgtgcgctccatgatgcgcggcgctttgatcggcgtgaccatctcggcagtgatagtcctcagcctcatgctcttgctgtggatgaacgaccgacgtcaggagatgggcgtattggtgtccctcggcatcggcaagccatccctgatcgcccaatatctaaccgagatgattctgatcggcctgccgtccctggtcctcggatggctgtgcgcacggggagcggcccaatggcttggcacctcggccctccgttccgtgaacgcctccgcggcgaaggaactgagcagcatgggacaggtcggcggcgatcttgagtccaatatgtcggttcgtaccttggattcgctcacggtatcgatcgacacaaccgccgtactgtatgtatcgctcggcctgctggcggtgatgctggtatgcgtcgccatatcgtgcataccgatgctgcgcaagtcgccacgaagcctgtcggagctccgatgacgggcatgaacgtgtggaagcgtgccacgctggcaatcgtacgtaaaccggtacgcagcggaatcatcggactgttgatgctgatggttttcaccagtctcgtggctcaggtcggagcgtcaacggcgcttcagaaaatgtccgacgatatcggcggaagcctgggaataggttttaccgtcgacaccggcgagaatcccgtcagcccaaaggaagcgagccggttctcacgcatccccggcgtagggaaaaccgtttacgaacgtaagaccctggcgcaggtggatggcgcgcatccggttgtccccgaacatggtcctcgactggattccggcctatccacgcaggtcagcgtgctgggcaccactgactcctcgttgtccgaagagttccaaagcggcctgtaccggttggaacaaggacaccacatttcaggtaatggccggaacgtactgattcaccgggatttcgcacgtgagaatggactatcggtgggatcgaccttccgactcagtcaggaaggccgcgattccaccgtccgcgtggccggaatcttctctggcaatgtacaggcacagagccctatgccatcggacgcatcggagaatctcatctattcgggcgctcaagtggtttccgcgctgactggagaggaacgggtcggcacgatccggtgcctctcggataatccgcgggatctttccgcagcaatggcccaagcaaagaaaatcgccggaagcgagtatggcgtcaccgatgactcggcgcggctttccggcgtgctgcagtcggtggaaacggtacgcgatctggtccgcatggtgctgttgtccgtctgcctggccgatgtgctggtattgggcatggcgcttgtcttctggattcgctcacgcatccatgagataggcacccttctggccctcggcatcggcaagatgcagattatcgcccagttcgcgatcgaaaccggtctcatggctgtggtcgccgccctgtgctcgctgggaacgggctccctattgtccggttacgtgtcctcgctcctgctgcacgattcgggagtcgcacctcttgaatcattgcaggtggaggctctgccgccggaacagacgctgctcatcctgctgctcggatgcgcggtcatcgcgatcgcgcttgccgtgtcgtgcgccgcagtgctggccaaatccccgaaatccattctttcctctatgcgttaggagatactaatcatgactatctgtctgcaattggaccatgtcaattactcatatggcgcggcgaagattcgcgttctttcggacgtgaacgcagatttcgaatccggaaagatgtatgcgataaccggtccatcgggagcgggaaagagcactttgctgtctctgttggccggtctggatgccccctctgatggagtggttcgttttgagggcgaggatatagctacgacgggttattcaaagcaccgtcgcgagcacgtgtccttggtgttccaggaccataatctgatcgactatctcacccccgaagagaatctgcgcctggtcaatcccaaggccgatatgaagatcctcgaggatctggggctgagccgtgaggaatcgaagcgcaacatcatgcacttgtcgggtggccaacgtcagcgggtggcggtcggccgcgccctagtggcgcccggccgcgcgattctggcggatgaaccgactggcagcctggatccggaaatgactgatgaggtgattgatcttttgcggcatgccgctcatcaactcggtaaatgtgtcattgtggtgacgcattccaaacgtgtcgccgattccgccgatgccgtttacaccctcagacataagaagctagccaaggcatagcactctcgcacagaccacgtcttccgtcatggccggcaagaaccgcgccaatgccccttccgccatcgtcctcggctgcgaaacgggtgtcgggattgcgtcgtggatcggtgacgtttttgggactcgtcgccgatccacgacgcccatgccggcccccgtcctgattcgcactcgccccgatcggaccacacgcccgtccggcatcgacagaagtaagaacggccgggacatgccccggaaagaaacgaacccgcctcatcgaaaaggaaccaaaaatgaccgcacgacacatcgacgccacggacaagacggacggaagccatgtcgtcaagatcctatggaacgaaaacgacggcgaacgggaactgaccgtccgcatgccggcagccggaacggacgccacggaccgcgtggacgtggacctcctgcccgtcccgggagaggatcccgccacgacgatggacgatgccgtcgcggcgttggagggattcctcggcaacaacaagtacatccacatcgatggggacgacgtcagaagcgtctgcgccggcgccctgaccacggtcatccgcgtggaaagcgggtcgtcgacgggcatcgtggaggcgctcgacggacggttccatgattcgagcgtcgcatccgacgaggtcacgggagcgataatcgccatcgaaggtccgaagagcctccaactgtccgacgccacggcgatcgtcggcggcgtgcagaagcgcctcaccgacaaggtcgagatcatatggggcctgaatttcgccgacgaggacgtcctgcgcgccaccgtactgctcgcaatacaacagaaataaagaacacgacgggtttgcatgcaggaaaatcaaacatcatcggaatgcctgttgcacttacaagtacgagtccccatgctaaccgctagtttccatgtcaccggggcgtcttttatccgtttatccgcgtcaacacgacccgcacggtcaggcaattcgggtcggactcccctgtggtttcgctgaagaaaaccgggggtgctacccaatcagctgttgtgggatttgtgccagatgagatacgagtaaacatacatggctgcgaccgagacaatcgcaagcaccataatcactgccagaatccaggtttcaggcaatatacctcctaaaaatcccagcacaatcaggctaacgcccaccaccatgaaacaggctccgccgaaacggtgggtgcggcgccagttgtcggggtcgtcgagcgcccatggcgttttgatgtcgagcgtgtagttttgccgcacacgaggtagataattacccatgccgatgaagaacgcgccgatcgccccggacacgatgacgttgaccgcgcccttgccaggaaggaggttccagacggtgagttccccaagccagctgatggcgcacatgaataccgtgaacgagatcacgaatccttggtagaatccgccgaacttggcatatgcggcacctttcggatcaatgcgcggcaccacatagaacagtgcgagaaacgtcaatggaagcgcacccagaacggatgccatccaacgtggcccccatccgttcacaccgccgtcaacaccccaatgcatgggaatgcgctcaggtagccccggcatggcggcaagatgcgccacgacgttcagcacgcaaagcagcatgaggacgacccatacacgggccggaataccggtcgaggctttggttgtctcgggtttttcctgcttttgcattgtcagacctttcattgcctgtcttccggatcgtccgcgaagcccatgaaccatccgaccaagtcctgcataactgtggtattgaggctgtacacgatgttctgcccatgtcgttcgtccgttacgagaccagcgttcctaagagtcgccagatggtgactgagcgatggcttgctgatgtcgaaatgctccgcgagctcccccgcggtcatatcccccgcacgcagcagctcgaggatacgacgccgcgtggggtcggcgagtgccttgaatccttctcctgccatcatcgctctctttccagtatcggattgggatattcatcctaccagatatttagacgtttgtctaaatatctaaaatacggaagtctgaaaacgtcatggaaaccggaatctcgttttttcggagcaacgctgatgtcaaggaacggcgccttccagtagactcggcaataatcccacgccataggcggcaacatgggcggaaccgcgcaagacaaggaggtcccgaatggaatacattcgaattaccagggacaacatcgatgcagagcacgtctgctgcgccatgtccggcaaacaggcccttgcgaaaaaggagtggctcaaacgtcgattcgacgaaggattgatcttctaccgcagcgtagaacgcggaaaatgcttcatcgaatatatccccgcggagaacgcgtgggttcctatccaagcggatgggtatctttacatcgactgtctatgggtcgccggctccatgaaagggcacggatattccaacgacctgttacgggagtgcgtgagggatgcgaaggagcaggggcggaagggattgtgtattttgtctgccgaaggacgcaagcgcgaattcctctccgacgcgaaataccttgcgcacaagggtttcatggttgcggacacgtcatcatgcggaatcatgctcatgtacctgccgttcggttcggacacgaagcctccgcaattcaaagaatgcgccaaatatcccacggcggatggtgatggattcgttctctattacacggaccagtgtccgttcacccactactgggtgccacgcgtggaagcggtggcggaagagcacagcattccattaaaaaccattcacatcatcagccgtgagcaggcccagaatacgccagctccggtcacgacctacgcgctgttcaagaacggagagttcctgactcaaggcatccagtccgacaagaagttcctgaagctcgcaggcgtacaggtctgatgccggcctgacgtttttttaagatgcggggacatcatgacgttccgcacgcattaccattcgaacaagtcggatcggcccgtacggcatggcggaaacacccccacccgcgcaaccgtcagcgtgcaatgcagcgaaaagcataaagaaaacgggttccgaatgaaccggaacccgtataacgtaaaacctcgaaatatctgaagtgtcagaagtatccgagtttcctagaaaatcaggcgaacaggaagccctggccgtgatgttccggatacgtgtcgaacagttcggcaacggaaccgtcttcgaacacggcgcggatggcacttgccagcaacggcgcgatcgacagaacagtcagaccgtcccaacgcttttcttccggaatcggcacggtatcggtgagcacgacctcgcgtgcgccgcagttcttcagtcggtccacggccgggccggacagcacgccatgcgtggcgacgacggtcaccgacttggctccggcatccttaagcacgttgcatgcgccggcgatggtgcccgcggtgtcaatcaggtcgtcgacaagcacgcagtccttgcctgcgacgtcgccgaccacacggttggcgaccgcctggttcgggcgggtgatgtcgcgggtcttgtgcacgaaggcgagcggaccgccgccgaggcgctgcgcccactgttcggcaacacggatacgaccggcgtccggggagacgacagcgacgttgtcaagttggttggagaaacggtcacggatgtaatcgaccagcaccggcatggcgatgagatgatcaaccgggccgtcaaagaagccttgcgactgcgccgcatgcagatcgacgctcatgatgcggtcggcgcctgcggtcttgagcaggtcaaacaccagacggcaggagatgggctcgcggccgcggtgcttcttatcctggcgggaatagcccagcagcgggcagaccgcggtgatggaacgcgcggaagcacgcttcaacgcatcaatcatgatgagctgttccatgatggcctggttgaccggattggaatggctctgcagtacgaacacgtccgcgccacgcacggactcggtgtagcgcacgtacatttcgccgttcgcaaaatcgtatgctgtggtttccagaacatcaatgccgagctgttcggcgacttccgccgccagcttcgggtgtgctctgcctgtgacaaggataaggttcttatccggctttccttcaaggattgcgctcaccgtgtctccaaacgtctgttctagcgaagtggatgtgacccatactaaccggccgcgcagacctcaccgaccccgtgtgttcgggggccatgcgatcgttccgtccaccttctatcggtataggccgtgtttgccgatgtattgcaccacgccgtcgggtacgagataccagacgggttcgccatgttcggcgcggcgacgcacatccgtggaagaaatcgccaatgcgggaatctccagcgtatccaccttgccttcaggtaatttcacgccgtccggcgaggaataaccgggacgtgtcacggccacgaaatgcgccagctcccacatcttgttggcgtccttccattgcatgatctccgccacggcgtcggcaccggtgatgaagaacagttccgcatcgggatactgggcgcggatgtcacgcagggtgtcgatggtgtaggtgacgccgggacggtcgatgtccacgcgcgacacggtgaatttcgggttcgacgcggtggcgatgaccgtcataaggtaccggtcctccgcattggtgaccttcttgtccaacttgaacaccggccgtccggtcggcacgaagatcacctcgtcgaggtcgtacacccaggacacttcggaggctgcgaccaaatggccgttatggatcggatcgaaagtgccgcccatgatgccgatgcgcaaccggttgtgccagttgcctcgtgcggacctgcgtccggtggtcacggctgattgcggccggtctacggatagttccgacatgcgtcgttccggctcgaccacgtagctgacggtcagttcgggatcggcctccgcagattccggccgcatgcgttttggtccggtcatgcggacgctccgctcttttgcgcgccatcggcctgctgttcggcctgtttctcggcctgctgctctttatccgcgtcggcggtttcctgctcgatgctgtccgcggtcggtgaggcgttgtcgggatcgatcttgtccatatccccatcccactcgtcctgcaccacacgtcgaatctcggcgaatgtcggcagcgggaaatccggctggtatatactgcggattccggcaacgcgctcggtgacacgaatcagcgtgtcggtcatgccgacgatgtcatgatctcgttccatcgcgctgaacttggcgatgtgctgttccatgacccgcatctgctcgtcgatatcgtcaagctgggcggcatcgggagtgatgacgtccgaagcgtcggtttcgggccagccgatcaacaccgcgtcggcgtattcgagcgaggcgcgttcgtccgcggacgcgataccgtcttcgacctgcacaaggaacacataccgcacgatgctcaatcgttcggatgccaatcgcaatctgagcattgggtcggtcaagtccgcgttccatgggttcttgttgtcctgcatggtgtgctgcatattgtcctgcatgacttcgtcgctcattctctcacctgtcctgttccgtagccaatccatttggtcgtggtcatctcgcgcagccccatcggaccgcgcgcatgcatcttctgtgtggagatgccaagttccgcgccgaatccgaacacgccgccatcggtgaaacgtgtggaagcgttgaccatcaccaccgccgagtcgatgcgggcggtgaattcctcgatggccgaatagtcttcggcgatgatggattcggtgtgcccggtggagtgacggttgatatgcgcgatggcctcgtcaagcgagtcgaccaccttgatgccgattttgagtgccagatattcggtgtcccaatcctcgtcggtggcatgcacgagttgcgcatttgcgattccagcatgttcgatgatgccatacgcgcgttcgtcggcatgcatttcgactcccgctgcggcgagcgctgccgcggctttcggcaggaagctttcggcgatgtctttgtggacgaggagtttttcggtggcgttgcatacgccgacgcgttgggttttggcgttgatgaggatggggatggctttgtcggggttgccggtgcggtcgacgtagatgtgcacgttgccggctccggtttcgatgacggggactttggagttgcgtaccacggcttggatgagtcccgctcccccgcgtgggatgagcacgtcgatgtggccgcgtgcttccatcatggcggtggcgccgtcgcgtccgtattggtctacggtggcgatcatgttgtggtcgtatccgtgtttggtgagtacgtcggcgatgacggcgagtgttgccgcgttggtgtgttcggccgcgtgtccgccgcgcagcaggacggcgttgccggatttgatgcatagggaggccacgtcgacggtgacgttgggacgtgcttcgtagatcatgccgagcactccgatggggacgcgtacctgctgcagacgtaggccgttttccagatggtatccgcgtacgatttcgccgatggggtctggtagggatgccacgtggcgtacgccttgcgcggcggcggtgatgcgctgctggtcgaatttgagtcggtcgagtttgccggcgtccatgccgtcggtttcggcttggttcatgtcgagcgtgttggctgcggcgatgtcgtccgcatgctggtcgagtgcgtcggcgatggcgttgagcagttggtttttggcttcggtgtttgcctgggcaagttgcgattgcgcggtgcgggctgcgtcgcccatggcgcatactgcttcgaacacgtcggcgttcatggcggtgccttggttctgtggattcgtcatagtctcttagaatagcgcgaaatcacgcctcgctgggcaatgacggccattttcgggtcgttggttgcgcggcgggacgcgatttcgtcagtcgaggctggtgatcagtggatttggtcgagtcccgggtaaagcgggaagtcttcggcaagcttgtcgacgcgcgccttgagcgcgtcgacgtcggcgtcctgtcctgcggcgagagcggtgccgatgatgtcggcgacttcctcgtattccttgggtccgaagccgcgggtggcgagtgcgctggtgccgatgcgcaggccggaggccacggatgcggggcgtgggtcgaacgggacggtgttgcggttgatggtgatgccgcattgtgcgagcaggtcttcgccttgtttgccgtccatttcgctgttgcgtaggtcgaccatgaccaggtgcacgtcggtgccgccggtcaggacgctgatgccgttgtttttgacgtcgtcggccatgaggcgttcggcaaggatcttggcgccgtcgagggtgcgttgcatgcggtctttgaattccggggtggcggcgactttgaaggcgacggccttgccggcgatgacgtgcatgagcgggccgccttgctggccggggaatacggcggagttgagtttcttggcgtattcctgcttggcgaggatgaagccggagcgtgggccgccgagggttttgtgcgcggtggaggatacgacgtcggcgtatgggacggggcttggatgcagtccggcggctacgaggccggcgaagtgggccatgtccacccagaatttggcgccgacctcgtcggcgatctccttcatggctttgaagtcttcgatgcgcgggtaggcgctccatccgccgatgatcatggcgggatgggtttcgagcgcacgctggcggatgatttccgggtcgatgcggaaggtttcgggattcacgccgtaggcttcggcgtggtagaagcggccggagaagttgattttcatgccatgggtgaggtggccgccgtggtcgagggcgaggccgaggaccgtgtcgccgggtttgacgagcgcctggtagacggctgcgttggcctgtgcgccggagtgcggctgtacgttggcgtattcggcgccgaataggcttttggcgcgttcgcgggcgatggtttcgattttgtccacctgctcgcagccgccgtagtagcggcgtcccggatagccttcggcgtatttgttggtcagtacggagccttgtgcctgtaggacggcgcgtggcacgaaattctcggatgcgatcatttcgagtccgttttgctgcctggatagttcggcgtcgaggatttcggcgatttccggatccgcttcggcgatgggcgcgttgaacatgtcgttcggtgtttgcgcaagaggtgatgcagtcatgaagccctccttgacttcggaatgatcatccgctgtaccgcgggttacagagcagtgtacgtgtgaaaacgatcggaggaaaacagggtttcgaaacatgtgggaaatatggcaccgcctgcgcgtgaagacatggacggcacgatcgcggtgccacgtggaaaagcaggaccttccgtcggcaatcgtatggggtcggcgtcccattccacggacgcgaggcgacgttcttcccacctgtgccggtacactgagaagcacgtttgacgtaatctgtccgttctattgctaaggaaatcaagtgaccacgttccacagcacacgcagcaccaccgattcgcttacctccaagcaggccatccgcaagggcatcgccgatgatggcggcctgttcgtgaccgactccttgggtgagacccatgtggatatcgcttccttggccggcaagtcctaccagcagatcgcgttcgatgtgctgtccgtgctgctgccggactacaccgaggccgagctcaaggagtgcatcgacgaggcgtacggcccgcagtggtccgacgagaagatcactccggtcaagccgctcggcgatgactatgtgatggaactgttcaacggtccgacttccgcgttcaaagatgtggcgctgcagattctgccgcgtttcatggcgcgcaccactccggcggatggcgacgcggatgagaagatcatgatcgtcaccgccacgtccggcgacaccggcaaggccgcgttggctggtttcgcggacgccgcgggcaccggcatcaccgtgttctatccggaaggcaaggtcagccaggtgcaggagctgcagatgaccacgcagtccggctccaatgtgaacgtgtgcgcggtcaagggcaatttcgatgacgcgcagtccgccgtcaagcgcatcttcggcgacaaggagcttgccgaacgtctcgccgatgattcgcatgtggtgctttcctccgcgaattccatcaatgtgggccgtctggtgccgcaggtcgtctattacttctccgcgtacgcgcagctgctggaacgccaggtcatcaatgtgggcgacgaggtcgagttcgttgtgccgacgggtaatttcggcgacatcctcgccggctattacgcgaagctgctgggcctgccggtcaagcatcttgtggtggcgtccgacaagaacaacgtgttgttcgacttcctgacttccggcacgtacaaccgtcagcgtccgttcttccagaccatttccccgtcgatggatatcctcatctcatcgaacctggagcgcatgctgtattacatgtccgacaaggacacacgcctgatctccatgctgatgaacgatctgagccagtggggcgcctacgaggttcccgagccgatgatgaagaagattcgttccatcttcggcaccggttgggccgatgagaaccaggtgcgcgagatgatcgcggactgctggaacaagaaccattacgtgatcgacccgcacaccgcatgcggctactacgtcatgcagcagatgccgcgcgatccgctcacgccgcgcgtgctgctgtccaccgccagcccgtacaagttcccgcgcgtagtcaacgaatctctgggtcttgacgcgtccggcaccgatttcgaatgcatggacgtgcttgccaaggccaccggcaccaccgctccggccgcgctgcgcggtcttgagaccgccgacgtgcgtttcgaccatgtcgttgacatcgacggtatggaaggttttgtcgagcaggccgccaaagctctgtaaaaactctgtaagcgaagcatactttcacatcgttaaagccatctccatcggccgtccgcaatatgtggacggccgtttttcgtcaaggctgctacagttgcatgctcggaggcgaacgagcatgacagcaccaacgatacccgcatctgaatcggtacgacagaagcaaccggcacaacaatcgaaccagcccgaacagccccggcgtaagcatgatcgtctcatcacccgtgatatggcgttggtcatgcttgcgacgttctgtttcatgtcgagcaatatgcttgccaatccgatcgttgccggatatgcggaatcgttgggcgcggacggcatgctgatgggtgcggtggccgggtcgatgagtttcatctcactgttctgccgccctatcgcaggcaatctttccgacaaaaccagcaagcgcacgcttgtggcggttggcacggtgctctatttcgccgccggactgctgtactatttcgcaaactcccccatcatgctcatcatggctcgcgtgatcaacggcgttggtttcgcatgctgctcggtctgcctggccacgtggatgtcgcttttgctgccgatccggcatatgggtgccggcatgggattgtatggcacgatgaacgcgctggctatggcggtcggaccggcattgggtattcgcgcgcaaaaatacatcggttatcgtctgacgtttttgagttcgctggtgctggcggtgatcatgctgatcgccacactgatggtgaagaatggcggacaaccggtacgcaaaaagcagacttccataacggagaatccctccactgccgtagacattgacggttctgctagcgcaaccaaaaagcatcgtttttcgatccgttcgattctggaaccgcgtgtggtgccgttgtcgctgacgttcatgatgtttgcgatagcgtatttcgcaaatcagtccttcatcgtgaattatgttcagtctcgtcatctgccggtatcgtccgacctgtttttcatgttttacgcggtcgcgttattggtgttgcgactgggcttgcgcgacctgttcgacagcaagggcttccgtttctggctgacggtctgctcgttgggcatgctggcgatgctcgcatgcatgacgttcctgttcaatgattggatgctgttgttggctgcgattttcaccgctgtcggctacggtctgatgagttcagtcacgcaggcgcaggccgtggtaatcgcaggccgcgagcgcagtggtattgcgaatagtacgtattatgcgggtattgatttgggtatgtcggttggtccgtttgtgggtggtttggtgtatgggcgtttgtctgctgtgtggttttatccggtgtttatgttggcgatgcctgttgcttggttgatttatttgttgtgtgtgaagcgtgtttcacggtagttgttggcatcgtgtgcgaggtttctgccgtaaaccattccaagcgcgtgtcgttctaactgtttttgcggtcggtcgtattttccatatacggcaatatgaccgaccgacgcccatcctggctcgtgcaaggcgtccatgccgaaggggagatgtcaagatcggcccttgccgtcgtattccgttccagcctttccggctatttgacttggtggattttgttgcctttgaccatgtaggcacgtcgggccatgtcgatcatgggctggtcgaatcggctgtctgtgtagaattcgtccactcgaacgttgtctccgtagagttcgcggaatcgtttgggcttgttggtgttgaagttgaggtagtttacgttcaacgtgttgccgtcgatggtggacgagaccaaatgttgcacgccaagcctgcggcaggcctcgcccacggtgatgtcgaacgaggcggtgaggatcacatcgtcttcgcgtggctcataccagggtttgatgcgcttcatgttctgatcccagaaggcgttgaccaattcttcgaattccaatgattcggccagttcgcttaaatatccgtggcatagcttgcccacaccgtattccatttgatcgaacgtggctcgtccgagcttgtatttgatggcatagcgcagtaccggggcgatgtaccgcaataccttcggattgtatttggccgaaaacaggtacaggtcgaacaggctttctccgtcatagatggttccatcgaagtcgaatacacgcatgtatgcagctctcacttcctcgtatgcgcgcattcaatacgcgccattgcatctcatgctaaagtccgaaggctgattcctttttacaccaaggtgaacggccggcgaccgcaatgtgcacaaattgcacatctcaatgcacattcggttcatgtcacgtttggaaggaggaaccaccacaacaacacagtcggaccgctattcgccccataggagccgttcgcgctgctgatactcctcatcgaacaacggctgggccttcgtgtcgatgagcttggcgaattccagatcctcatctcgttccacccgatgctcagccatattccattggtcatggtacgtgtaacgcaatgcctcggcatccgttttcagaacatgcgaccggtaaaggtcccgttcgaatagaagcgtatcaaccagccatcctggctcgtccggaaacttgctgatgccattgacgtactccgcacgatacgcgtcatggacaaggacaggcaacgcatcgatacgcaaaagctccttgaacatgataagccgtccgattcgaccgttgccgtccgaaaatgggtgaatcttctcaaacgtccaatggacacgggcgatctgatacggttcatcctcaagtttcgtgcacatatcaaacagcctgtccataaattcgggaacatcctgcggcagcgcagtccttgtcggagtgacaggattgccaataaagttcggccgagtcttgtagccgcccacgttgaaaagcgagtcggagacctgtctggtgccctgcttgagaatggcatgcaggtgacagaccatatcccggtccaccggctcatcagcatggtcgagaatccaacggaacgcagcgaaatgattacgggtttccaacgcatcgtcaggattgacctgttcgctgccatccgtggtataggtaccggtggcaaatagctgcgcggtctgtttggcagtaagggtggaaccttccatatgattggaattccatgcgaactggatttgtgtagtcgtgtaaatgccgtcaccatatcgagtatcacgctctcggataagacgctccacgatacgttccgccataaccccatccttccttcattccgctcgactatcctcccatggtaattcatttaggctagaaaccgtggtggatgtcgtatatcctgcaggttggttccatgtcgaacgtgaccgtgtcgaactgttcgggatggtgcacgaacgtatcgatcagtttccattggcgacggctgatgccgatacgatagtccggacggaccataagcaccggcgctttcggctggagttcctccaagagctgcgcgcgctgttcgaagcattcatcatcgtcgatccatacgatcggcgcgggttcattctcttcgcattcgatgcgtacgcgtcgttggatggtctgccatttgcccgtctcacgtccccatttggtgacaggatcataccaggtgacgacatcgaccagcatgggatcccagccgagcatcgggtcgagaatctgactgcagtacggctgccaggtggacagccaccacaattccacgataccgtcgaccgccaacgcatacatcgcgtcggacagttcactggaccaatgaatacgccatgagcctacgggcgtgtgggctttttcgttactgtccaagtggaacgctttttcaggattgtacattttcgcgtagggactgtcgggcttcgcccaggtcatgaccttgttcacgccgcccctgcgcaaaagcttgtcatccggaaaggcgttgagcaccccatcgaaatccgtgaacaccacaggcttggaaaacattttcaactccgtcatcaccactccccttttgatcgccaaccatcttctggtcttgactctacggcttcctcactacgctttacctgacaaatactgacagcaccgccatcgttttatttgctacactcgaattggttcggcatagacgtcgagcaaccgcagacacgagcataggcaaccgcaaacatggtccatagatgcgcaaaacatgatgcgcgaacgcatctaaaagcggtcatcataacgcaaaggagcgaaacatggcagttgaatcatcgcagattccagagaaaaccgtcgaacaaatcttcgacgaacgttatcccctcgacaaatggaaggattcaaactactcgatactcgacaaattctcaatgcgcggccgcaaaggcttcgtcaccggagccgcaggcggtctaggacgcaacgccgcagccgcactcgcccaagccggagcagacgtcgcactagtcgacctgcccagccaagaagacaagctcaccgaactggcgaaagacatgagcgaacgtttcggcaccaacgtcatcgcgctcacctgcgacgtcaccgatacggtacaagtcgcggaactcaaaacgcaattggtggaacagctgggcaccgtcgacttcgcattcctcaacgccggagtcaacgtaccgggcgacgatcaagacgccaccgaagaagtatggacacgcaccatcaacatcaacctcaacggcacctaccgtaccggccgcatcgcgcatgaaatcatgcgcgaacacggtcatggcggctcactgatcttcacagcctccctgtccggacacaacgcgaactacatgatgggaagtccgacgccggtgaacgcgtatggcgccaccaaagcggccatcatggaacactcacgttaccttgccgcagcgctcgccaaggacggcatccgttccaacaccatctcccccggatacgtgtggtctggaattttcaatggccgtatcgacatgcctggccacgacgctatgctcgaagtcgtgccaatgcaccgtttcggcacgaatgacgagattgccagcacggtactcttcctcgccagcgacgcctcctcgtacgttactggcactgatattcgcgtagatggcggctacagcgtcttctaacctctaacaaccatctagcacgttgaggccggccgtggctcacagccctccgaccgacctcaacaggcgcctattcgcgctttatatcggcacgaagtccgaagaaccgtaagaagcaatcacgtcggcatcaattcgccagtagcccgacagcatttgacgtttccgttgttgtcggatgccgatctgactgtgcatcgtttgtatggtgcgtatggtgagaagaaattatacggcaaggtctatgagggtgtgattcgttcgactttcgtgatcgatggtgatggagtgattcgtgtggcccgaatccatcctcgctacagcaatcacgaacgcttcttgggaatccttgtacaagccggttcccacggcggagcacatcgcgccgccaaggccgccgaactcgtttactgcgacgttttcgacagggatgcccagcacgtcggcaaagacaaaacatcatcacctcgatgtgcattgtcctcatctcgcttatgcatggcagattcgcggacttgtacggaggcatctcagctatgccacaagtcatcgctcaacctctttccaaccatgattgcggccaagagaacgcccacttggccgcaatcacaaaacctacacatcgagaaaacccgaagaatgatacgagctgtcatccgcaaccggaacatcatcctgttcttatcctgcaacaacaatcactgctatgttgccgaagcctacgactacagaccaagcaaacggtttccggaatcactcccatcttgctgatacgacgcttctcacacgcgtaccccgcctgtggatgctctcggaaagaacactctcattcacaagagatgcaggaatgtaatcacccgtccgctcatctttcttgttcacctgttccgacaagcccaacgccaccgctcatcaccagcaaataaaatcaagccacttttcgcagattccaccacataggcagcactcgccacatggttgaaggcctcacctgctatatccagttttgattttgcatgactccgccgcttttcgtatgacgtgttcctgtcgctatgtctatgggtgtagtccacgcgcttcgccgtaaaattccttcgtatgatgtcgtcatagaaatccgactgccgggcacgacgtcccttatggaagtccatgtagtattcaaacccacatagatgggcaaaacgcctttagtaaacctgatggcaacttcgctaccgtcatcacattgaagaatcaaccgtcccgaggaaagcaaccgggcatatgcgggacggatttcgtcccttactttccgaagccactccgccttctctttgctgtggtcagccatcattgccctccgaataaaaagaagggaacagatcttttcggatctgttcccttgacgggtctgacgcccactgcttgggcggttcgccacgctctcgcgggacgtttcgctcacccttccgctttccaacggtttcgcacgggtggtatgctacgcctcccttacggtttccacgtctccgacgtggcggaggtatccggcagtgacctctcacaagccttccgccgccccgaccgacggcaagccggtttggggaatggcacaaaacttgtcatcccaataatagcccatgcacaaacaaaaccgttccgctcacatcgaaatattcgataccgcgcttgctttggaacgagaaaaatagatcgtcgcgcaacgagtcaagcaagccgcgcgcacgtaaggcgggtatgatgacgcctattcgcgctttgtatcggcacgaagtccgaagaacggtaaggagcaatcatgtccgacatcaattcgccagcgaccccaacagcgcaggactcccccgcatccgcacgactcgaagcgggattaacggccccgaacttcacacttcccagcgacaacggcgatagcattacgctctccgcattgcgcggtcagaatatcgtcttgtacttctaccctgccgcgatgactcctggatgcactactgaggcctgtgacttccgggacaacctcgcgcgcctgcgctcccgcggattcactgtgctcggcatatcaaaggatccgatggacaagctcgtccggttccgcgagcgcgatcatttgacgtttcctttgttgtcggatgccgatctgactgtgcatcgtttgtacggcgcgtatggtgagaagaagttgtatggcaaggtctatgagggtgtaattcgttcgacttttgtgatcgatggtgatggggtgattcgtattgcccgatataacgtgcgtgcgaagggtcatgttgattctttgctgcgtgcgcttgacaagctagatggttcagttttctagtctggaatgctttgttgttttgtttgtggattagcttttctatgtgaaggatgcaagctgactcatgcgcagagcgagaagtgctcagattggaaatgctctatctcgtagaagaaccgaaaatctcgtcgctccccttgcggaggcggtcatgaattctccaaaaggcgtagcgtattccggtaacggttttcgatcaatgacaccattaccaaggtcgcgggaaccggtgtcacgatgattatcgtgacacatgaaattcgattcgccaaaaacgtatccgatcgcgtcgttttcgtggacaaaggtgcaatcctggagcaaggtacgccccaggaagtgattgaccatccccagacggcacgagtccaggaattccccagcaagatggcgctgaaataacagttaccatctattccacaaccttgtccggtacgaagagccgccctttcgatggacggctcttcacatatagcgttttttataaaattcttatttgctgaaatgcccgagaagtaaaaaagacgactcaatctaaagattatcccctctggcgcagtagacttttcctatcaacattctacaaagatgtccgggagattcgaaatggtagactgcacacctgatccaaaccttttggaatcgatgcggtccgtcggatacagcctgaacaccgcggtggcggatatcatagacaactcaatcgccgcccacgccaaaaccatcagcatccgctacttcgaccacggcgaagatccgtatgtggcaatcattgatgacggtgacggcatggactatgagacggccgtgaacgcgatgaaactcgccggaaccaacccgaacgccaagcgcaatgccaacgatctaggccgtttcggactcggtttgaagaccgcatccctttcacaggcacgttccgtcatgctttccaccgttcagcacggacgtcagaatacgctccgatgggatctggaccacgtcgcacgaacacgcgaatgggatctcgagaccttggatgaagagcagaccaatcttgaattgcctcgaaaggtgcgggatctcatgcctagcacgcatggcacatgcgtgctatggcgtaacctggatcgtctgggaaacgtcgcgggcgattccctgcaggatatagaccaagccatgctcgaactgtccgggtatctgggtctcgtgttccacaggttcctccacccatatcctgaggatgaaatcgaacgcatctcgataaccgtgaacgatgagcccgtgccggaacgcgatccttttctcgtgaacaaccttgccacgcagcggcaacggatgcagcgcatccccggcaccgacgccacgttgtgcggatatacgctcccctatcagaacaaactgaccatggaagacagaggtcttcttgatctgaaacaggaaaaaggacacacgctgttcgatacccaaggtttctatatctaccgcgcgtaccggctaatcacctggggcagctggttccgccttctcacccgcaaggaagcaacgaaactatcccgcgtgcaagtcgatatcccgaacaacatggatgacgagtggacgcttgacatcaaaaagtcgcaggccacacctccgaagaccatacgagacgcgatgaaacgctacgtggagaaattagccgctcccagccgccgcacgcagcagttccgtgaaggagaacaaaaaatgaaaagctattatgattatcttgaagaaagtacgaatgttgtgaaaagcaatgccaacagaaacaagattattacgattctctcctatctcttgatttgggcgtttgcaatgatagtgttctggttttttgcaagtggaagtgacgctatgggttacagtttgatgtttctttggtttattcttcctatatccacatttattgtatctattgttattggtaaaaataacttttggggaaaaggaaaatgggcattcactcttttctttggcgtaatgtatatgcttgctgaatatggcacattcaaaatggcaaacaacattgcttttaacaaactgaatgcccctgacttgggaatgattgtagccggagcaataatctctgcaatcggtatgttggtaggttcactgtggaataagaaacgccacaatcaaaaaaaataagtaacaagaaaaatcccaacttgttattctgaaaatttaactgaataaccacagcacaaaccgctgctacatggaagctaacaaaccatgcaacagcggtttttctttaccgttttttcctctgactgataggcgttcccattttctttgattttttgagaatccgaatcagccagcgaaattcttcgtctgacagatttttatagttgataccaagctgcttgcagtaaagaacaaccagcttttcatcccgactgcccttgaaattttcgactgcttccagattttctttcagttcatcggcaacggtagtttggggtgcgctctcgctgtcctttttgtgggcttcccgaatatcccggataatgagattgaggtcatcccgtaccatgtggctgaaatactcatcatcactgatatgggcagcttgcagcacctttaaatgcgggtcatcttcgccggggcgataccgttcaatgatttcatgtcggacggtatcgacaagggcattgaggttctgaatctgcatggtggcaatcccatccacataaatctcaatgtccgcaagaaacttgataaagtccttatgggtggcaagttcgcagagcaggcggttgttaatccgaccgcttttcaggagtgccacgtcaacaagtgtacctgctgctgtcggccgccatcgacttcgacgtgacgcaagccgttgacatcaccaaaggcgttcacggtctgattgatctgtcgatgtttcaacaactgcccgattatgaacggacgatacgcgacattggaaacagcagatggactgccatgcggcgcatgccttattggcccagcaggctcagacaagtcactggttgatctcgccaaagaactctataagggaatggaataacagacggtttccctaataaacaatcatgcagcaagatagcaacaccacccaggcgacggatcgcaccaaaagggacgctctctccttcggcgcgaagcaaatcgcaatcatgactgaagtgggactcatcgccggttccctacattgcttatgttgacgatcatgccgttggcgtggctgatctacctgtgtttccgccgtatcatccatccgactcgcgtataaccgtccatacgggaatccgcgaacgcaagtaaatgtcgcttccgtcaatcgccgaccgcaagagacgttcatggagcggcggattcccttatattccgagaaaacccgtactgttatgcgacacgcaataacagtacgggttttctgtgttactgttatatataacagctaaacagtttgcatctaactgttcagctgggagatatatcacctacgaaacatacagaaaaagaggcacagattgaagctgatcatctcatccgtgtccggagaaccgatttacgagcagatcaagaaccaaatcaggtccgcgatcatgtcgggtgagcttatggcaggcgaggcgcttccctcactgcgcaagctcgccaaggaactgcgcgtcagcgtgctcaccgtgaccagagcgtataacgaactggctgacgaggggctcgtggagaacgtgcagggcaaaggcacgttcgtgatggaacgaggcaacgaactcatgaaggaacgtgcgcgcgaacgcatcatggacaagctccgtgaagtttccatcgaggccaaagccgccgacatcagcctgcttgatctgcttggcatgttcgagaaagcatacagggaacaatcatgaacgattcctcgctcccccacgggacacggccaaccttggccttgagcgtaaccggattgacgaagcattatgattccggcttcacattggatgacgtgaccttcgacctgccgtccggctacatcatgggtctggtcggtccgaacggcgccggcatcaccatgcacgagccagttaaagtgacggatgcgatcggtttcgccgcgatgaccgtgctgaccctcgtgctactcaacaccatcgtgcagccgttcctgtaccggttctccccttatcgtgccatggccgccattattctgagcatcggcgtgatcgtgggcacggtcatcggactgcgcaaggcattgccggaattcgaaaagaccgtcgaacagctggccgaggcgatcagccggcaccaagccattgcattagcggcattcttgatcatcgacgtactcgccttagcgttctccagcaagatatcactgcatatttacggtagcaaggacatctgaaccgagccaaccggtagactcttatggagaacggatttggggtcttccgaatcaacggaaagccccaaatgcatatatccccgtacgacaacggttcctacaatgcggcaggcgcgtcgtggaagtcgaacatgacgccgtcggccagatcgcagatctcaggccagtcggcgtcggaggaatcgtcgtgcatggcccacacatgcatgccgaccgacttggccgagcgcatgccgacgagcagatcctcgaatacggtgcagtcgcttggtttgatgccgagcctcgacgcggccagcagatatacgtccggctcagttttgccgacgtcgcccgcgtcgtcgacgctgaccacgtcatcgaaatagtcgaaaatgccgacgtgcttcatggccggttcgcgcagcatcggcggcaatgacgtggccacagccagtttcgccccgctcgccttcaacgattccagatattcgcgcgcatacggtttggcttcaaccaccgtggcgtacatgacacgtgccatatggtcccactcctccatcaacgcttcgggagtgtccgacaggctgaagcgtgcgattgtgtattcggcgatctggcggaattgcatggcggcgaccttctgcatgtagtcgtccggcacctcgatgccgcgtttggcaaggaagtcgacgtccacctgatcccacacgcccatggagtcgagtagcgtgccgtcaaggtcgaagatggcgcctttgccttggttcgccttggttttctgtgtcatatcggctcctttgttttgcaattaccgcttttacgatttgcgattactttttacgattgaatccgccgtcagtcaagcaccgacgatttgagcagttcctcggcatgttccagagatgtttcgctttcgctgccggaaagcatgcgggcgatttcatgcacgcgctcatccccgcgcacctggctgatggtggtggcgatggaaccatccttggtttcgcctttggcgaccacatattgttcgtccgcccaggatgcgacctgtggtaggtgcgtgacgaccagaacctgcgcggattgggcgagtttggccaagcgggcacccagctccacagcggccttgcctcccacgccggcgtcgacctcatcgaagatgaacgtcatcggcggcacggttcctccggccacgacatgcttttcggcggcgaccagttcaagcgcgagcatcagacggctcaattcgccgccggatgcgcttttgcccatcggcagttgcggggagccggggaacggggtgaagaggaattcgatgtcgtccgctccggtggcgtccaactgttcgcgttcggccacgcggatctccagtttcgaagtgcccatggccagcgaatcaagttccgcggtgactttggacgcgagttccttcgccgcggctctacgccgtttgctcacagcctgcgcggcttttttcgcagcctcaagcagttgggcgcgttcggcttccagctgttcgaccttttccggcgaggcgtccaaatcctccaaatcgtatacggccttgtccctccacgtgatcacgtcggacaattccggcccccatcggcgggtcagctcgtccagctcgtggatgcgcccgttgatggcatccagatcctccacgctcgcctcattgtccacttcgccggacaggctgaacaccacgtcggacaggtcggtgctgatggagtcgagccggtcggcgagttcggagaacacgccttccacgtgaatggcgcgcaatgcctgcgaggcacggtcgatcaaatcggcggcgctggccgattcaacgtcatccgccacttgcgaggcgtccaacgcacccaatgcgcgggtcacgccttcggcgatttcggcggcgttttcgatgcggtcccgccgtgcgcgcaattcgtccatctcccccggctgcgggtcgacccggttgatgcgttcgattgattcgcgcaggtaatccgcctgctggcgcatggacgattcctggctgttgagcctttccaaacgctcgtccattgcgcgcagcgcgttccacgtcttgccgtaggcggccaacgccacttcatcccccgcgtagcggtccaggaattcacgctgccgcgaaacggtcgcgatacgtaactggtcggcctggccgtggatcgtcaccaattcggcggcgacggaagcaagcacggaacgaggcacgctacgccccgacaacatgctgcgggatcgtccggaagccggcaccttgcgtgacaggaacagttcgccgtcctctggctcgaagccagcctcccgtgcggcggccaccgcggccggcgacgaagcgacttcgaacacgccctgcgcccacgcctcctgagcgccgacggaaacacggccgccgtcggagggaccgccggaaatcagtcggatcgcactgagcagcatcgatttgccggcacctgtttcgccggtgatcgccgtcataccgcctgccggggcgatcagagcggaacgaatcggaccgagattgtgaatctcaagctcttccagcatgcccggtcacttcccgctttccggtttgccggttctagggaacgattgcccatgatgtatgccaccggttttgcgcgcctgctcgcgccagccgacgacaggcaaatcaaatttggtgacgagccggttcgtgaacggcacgccagacaaacgagccaatcgcaaagtgcatttcgattcacgcacttcgacacgtgtgcctttgggcagtgcgcgttgacgacggccgtcgcagcagatccagccatccgacgtggaatcctcgagaatgtcgatggcgaacgtggagccggaaccgatgatgagcggacgtgcgaacaacgcatgcgccgccaacggcaccaattgcaaggctttcacattcggccacatgatcggcccgcccgcggaaaacgcgtaggcggtggaaccggtcggcgtggatacgatcacgccatcgcaaccgaatgagctcatctccacgtcgtcgacacggatggacaattccaccatcttgccacggtccgcacgttccaaagtgatgtcgttcaacgcccagtcctcgatgggttccgtcgcgcccggcagccatacgtcgacgtgggcgatcatacgttcgtcgatggaatagtcgtggtcggcgatccgacggatcgcctcgctcatctggaagctttcaaattcggcaagaaagccgacatgccctaggttcacgccgaggatgggcacttcagtgcaatgaaccagttcggccgcgcgcagaatggtaccgtccccgccaagcacgaccacgatttccgtgtttttcggcactactggcgtcttgctgccgaaatcgggcgcttcgatattgtcgatgatcgtcacttcgaaatcggcgcgccgcagctgttcgacggcttcttcgaccaccgtgccgctttcacgcagacgtgtatgcgtcactaccaccgcatgccgggtaccgtgcatcgcaagccctttccgagaactctcgtacataccacgtcctcgacggacgccgatgcctaccattgtaatcgaacaaatgaacgaatggcggtagcgggtgtccggacacgccgcagacgtttccgttcgttcacgagccacgtacatcccacccgcaaaacctgttcgtcgttttcccacgaatccgccgaacaggccgaatggtatgtctctgcaccgttcgtcacactaccgtctacaatagctcaaggaaacgaagaccgtttatacagacaaggagcgaggaacagcatgtccaacctcgtcttcgacgagtcctcctccaatcgcgaggcctcacatggctatgcctggtggttctccgggggcacgttcgagaaggccatggcggaggagcgcaagccgcgcaagcgcagcctaatgcacagactcaccacacatcccggacgtctgaccatcctgtacttcatgatgttgggcgcattgtccacgctgctcctgctcacgcccaccgccacgccgaaaggcgagcaaacgacattcaccaccgcgttcttcaccgcgatctccgcgatttcgacgtgtggcatctccatcgtcaattcgacgacgcattggtccgctttcggccaggccgtgctcatcttctccgtgcagatgggcggcttgggtgtcatgacgttcgcttcactcatcgccttggccgtgaaccaccatctcaaggccacgcaaaagctgctgacggccaacgagctgggcaccacgaaactcggcgagatcaagggcgtgctcaccgtggtcatcgccaccgcgttcaccatcgaaggcatcacgttcgtggcgctgttccccggcctgtacaaagtcaatcatggcaatgtgcggcacacgctgtgggaatcgttgttcttcgcggtcatggcatacaacaacgccggcttcacccctgacggcgccggcctgcatgtcaacaattgggctgttggcctgcctatcctcgtcagcgcgttctgcggcacgctcggctttcccgtcctgcttaacctcatgcgctcatggcgcaaccatcgtccgccgaagcgttggagcctgcataccaagctcacgctgaccaccacgttctgcatcgtgctcgcctcgttcacctggttcctcctcatggaatggaacaacaaactgctgttcgccaccgaaggcgtggaaccgcggttgtggcatgcgatggtggcggccgtcatgccccgcagctccggcttcgacctgtcatggatgccgggcgtgagcgacgcgacgaaggtgttcctgtccatcgtcatgttcatcggcggcggcagcacttcgaccgcaggcggcatccgcgtcaccacattcgccgtgattctgttgacctgccgcgccgcgttcaccggacgccatgacgtcaacgcattccatcgtcgcatccattcgcaagccgtcatgacggccgtggccgtcaccacctcatgtctggcactcgtcaccatagtgtccatgacattgatggccatcaccggatgctcgctgagcaacgcgctgttcgacacctgctcggcgttcggtctgggaggctattcggtcggcgtggccagcgcttctagtccagcggtcctgtacattctcgccgcgaccatgttcatcggcaggctcggtccgctcaccatcgcctacgcgatctccaggccgcgcaatgtggagccggtccgctaccccaccgagcagatcgtggtcggctgagcggattcgtcgatacggtttctatacccgcaacttcctatacttgaatccggaacagaacatcgaaaggtacgcgaacaatcatggctaacaacaccagaagcgttcttgtggtaggactcggccgtttcggcagttccgtagccaccacattggatacgatgggacaggatgtgctcgccgtcgacaaggacggcgaactggtgaaccgctggtcgtcgcagatccccaccgtgcaggccgacatgaccgacgtgatggcgttggagcagatcaacgcctccgatttcgacacggcggtcgtagccatcggcgacagcgtcgaagcgtccgtcatcaccgccggcaatctgctggacgcgggcatctccgacatttgggcgaagtcggtgtccaaggagcatgcgcgcattctgcagcgtatcggcgcacggcacatcatcaacgcggagaccgatgccggcaaacgcgtagggcacttggtgtccggcaactatctggactacatcgagcttgaaggcgcgtacagcgtggtgaagatccacactcccccgcatgtcgtcggttactccatcgaggatgcgcgcgtacatgaacggttcggcatcaccgtggtcggtgtcaaatcgccgggcaaggaattcgaatacggttcgaaagagctgattatgcaccgtaacgacgagctcatcatcatgggcaagcaggatcagatcgacaagtttttgaggggctaggcccacggaacatgcaaaaggccggcggtccatatgggatttttcatatgggccgccggcctttcatttttacgctatcgattggcggagaacggtttacgccactgcatacagcagatactcgatgttgccgtgcgtgccttcgatcggtgagaccgccgtggcgcgtacatccagtccgttggctttcgcgcaggcggtgacggtgtcgagcgcctgtttgcgtaaggtttcgctttccacgatgccgtttttgccgaggttgcctttgccgacttcgaactgcggtttgaccagcagcacgacgtgtgcgccgggcgcggcgatgcgcgcgatgacgggaatcacgtatgtcaacgagatgaatgacacgtcggatacgatcatgcttggccggtacggcagatcatccgcttcgacgtcgcggatgttgacgccgctcatttcgatgatgcgctcgttgcctgcgatgcgcgggtcaagctggccgtgccccacgtcgagcgcgatcacatgcgcggcaccgcgtcgcagaagcacgtcgcagaaaccgccggtggacgcgccgatgtcgaggcaatcgaatccttccgcggaacgcaggcccgtctgggagaacatgtcgaacgcgccgaccaacttgtaggctccacgggagacgtaatcgtctcccagatcggcatcaagcgtgtcggcggccgtgactttgagcgacgctttggatgcgacgatgccgttcacccggaccttgccggattcgatcagccgttgtgctttggagcggctgtccgtgacgccacgctccaccagcgcgatgtcgagtcggacgacggcaccggaatcgtcattcatgttgcgcatacgcacgtgcggcaatcaggcgattcggaattccggcacgatcatgccgtcgacgctgtgtccgcgatccgccgcatcccacatggcggcgcaggccgcacgaagaccgtcgacgctggtgatgtcggtgacgtaaagacgatcgccgtcgacgcacgcctgcacgtcgcggcagctccaagcgccagcctcatgcacgacttcgggggccggctcgttaagtccggtcaggtccttggcgatgtaggtcggacgcagatgctccggagcgaacatcagctcatgcggattggtgacgccggtcagcacggccagggaatcatagccgccacgattgccggcttcgatatcggtatcgagacggtcaccgatggcgaggcatgcttccttggccactggttcggcaccatcatgcgcggcaagcagtcgggcttcgtcatacatggcggattccggcttgcctgcggacgaaaccggttccacaccagtggcgttgatgacggccatgatcatggaaccgcaaccgggggcgatgcccagctcacgcggaatggtcaggtcgcggttggtcacgaaatacgtggcgccctgttctacggcgtaggcgatttgcgccatctggttccaagacatgtccgggtaccagccttggatggccgcgaccggcttgtcttcggcggaatcaaccacttcaagaccctgcttggcgacttcctcacgcagatgctgtgctccgagcacaaacactttcgcaccttgcggcaccgcacgggccaccatacgggcagccaccacggacgaggtgatgacctgccatggttcgacgtcaaggtcgaagcccttaagctggtcggccaccacggattgcagtcgggaggaattgttggtggtgtattccaccgtcatgccgaggccttcggccttgcggatgctctctgcagcatgttccaccggattcttgccacggtagaccacgccgtcaagatcaagcagcgccagctggtaggcttcgctcagcggacgggttgtggatttcagcattgttttgccgcacctcactcgttgtcggaatcggctgcggattcgacctcatcctcagtctggtcgtcttcggagtcgcccgcgttttcgccgtcaccggcaggctcgtcgtcggactcggcgccttccttggccgcttcggcatcaagctgggtctcatcgttggtctcgccgttctcgtcgacggcctcggaatcgtcctcatcctcgtcttccggcgcatactgggcgtcatcttcggaaatgccgagcttgtccataagctcgtcgttcaattcctgcatgtcgtattcgatgaccagatcgtcggaggtctcgtcctcttcggcatcggcgtactgcagctcaagcttgtcaagcagctggtcgagggccacggcctcatcggagcgtccggcctgctcgaggaagtactgttcggcctgcaccgcacgcatgcggtattcgccggccagacccttggaacggcccagcgtatgcacgatctcaatggccttatcccacagctcgaggtcgcccagcgcgcccgcgtacacgaggaacatctcggccttggattcgccgcgcagatacttcgcgtcatcgctcatggcggtttcgatggccttcttcggctcgcccataccacgctcgcagtcggcgatgaacggcagatagtcaaggaaaccgttcatgcggaacgcggtgcggaactcacgcagggccagtttgtaatcgccctgacggtaggccacgaacgcaagggtctcacgcgcgaaatcaatacgggaagcctgatgcgccacccacttggcgtgttcgagcgccagctccggattcctttcctcaagcgtgtaggcggcgaggatgtgcaggccgatgttctccgcatgttccttggacaggccacgcagacgctcacggtcatcggtggacagcatgctccactcgatgcccttcggcatcttcggctcgcccgggcgacgatgcgtgtacgggttttgcgacgggaagctcatcgtgccgtcggaattgcgacgcggcttcgacaggtattcaccacgcttcgcctcgcggtactccatcttctcttcacgggtgaattcgcggcgctcctcgccttccggacgctggtcgcggtccttgtggaagtcacgacgctggttgtcacggcggaaatccctgcgatcgccgtcacgacggtcatcacgacggaaattacgacgctcgccatcacggcgctccccgcggcggtcatcgcggcggaagtctctgcgatcgccgtccttgtggaagttgcggccgtcacgacgctcaccatcgtcacggcggaagtcacgacggtcaccgtcatgacggaaattgcgacgctcgccatcgcgacggtcatcatggcggaaaccggaacgctcgccatcacgctggtagcgcggattgtcgccgcgattgccacgatagccgccgcggcggtcgtcacgacgctcgccatcgcggttgaacttgcgcggaccgttgtggaaacgacgctcctgaccttcgccttcgccatcgcgatggaaatcgcggtcgccacgacggtatccgccgccattgcccttgcgatatccgcccttacggtcatcgttgtggaagccgccggacttgtgtccgtaggacttgccgccgttgccgcgcggcttgaatcccttgccaccgcggttacccggcctgcccgagccgtaggacttgtggttgccgtaggacttgccgcgcgatccgcgctgttcttctgccatgctgttccttattggtcttgagatacttgcgattatttacttacgattgcctatgcgtctcacgcctgttcgacgacgccgagcgccttcttgccgcggcggatgagcacgaaacgaccatgcaggaagtcaccttcctgcaacgtctgttcctcatcctccacgcgcgtgttgttgaggtacacgccaccggacttgatggtcttgcgcgcctcggaaatcgacttgaacaggcctgccttcataccagcctcggccacacggtcgccggctgcgaccttggcgaattccccatcgaccttcatgccgtcgatagcggcctcaagcgtggactcatcgatgtccgccagatcgccgccacgtccgaacaacgcgccggcagcttcgatggcctggcgagtggcttcctcgccatgcacgaagctggtgacctcccatgcgagggtgcgctgcgcctcacgcgcgcccggattggtcttgcttccctcgataagccgttcgatttcggcctttggcaggaaggtgaacgccttgagcaggttctccatctcgctgtcgggacggttgaaccagaactggtagaacttgtaggggctgagcatcgtgccatccaaccagacggcgttgccttcggacttgccgaacttcttgccctgcgcgtcggtgatgatcgggctggtgaacacgttcacgtccacgccgcgcaccttgtggatcagatccagaccggaggtgaggttgccccactggtcggagccgccgatctccagcacgcaatggtactcgtcgaacaggtgcaggaagtcgttgccctgcagcacctgatagctgaactcagtgaaggagatgccttcctcggagttgaggcgacgggccacggtgtccttggcgagcatggtgcccatacggaaattcttgccgacgtcacgcaggaagtcgatgacgttcatcgaagcggtccaatcgtagttggacacgaaacgtaccggattgctgccttcggtctcgaggatgccgccgatctgcttcttcagacgatcggcccagccggccacgacgtccttcgggttgagcgtacgttcgcccgactggcgcggatctccgatcaggccggtggcgccgccgaccaacgcgatcggatggtgtcctgcggcctgcaggtggcgcatgttgatgagctgaacgaggttgccgatgtgcagggaggcggcggtcggatcgaagccgcaataataggtgatgggctctccgttcaacgcttcggcgagtcgatccctgtcagtggactgggaaatcaacccgcgccattccagttcatcgaggacggaatcgaaaccggcctccttgaaatcgatgacgtgagccataactgtgctttctccctatcgaattgtggacattaccgcgttttacgcaccctacagtttcgcagaagacacagacagccgcgtgtgccgttttccatgtttttatcaaagcgatcacggaacatgccggttaaaatcgaaaatggaatctccttgacgagaagaagggaggcctgcatggatcgcaaaggcatgaaggccaatgcaaggaaagcctataagagacactattggatgatagtcgtcatctgcctgttcgcttcggtgttcggtgtcgcctacagttcgtcgacatggtcggtgaacgccagttccccgtccgcaaccgtgcaggaggatggcacagcgcaatccgacaacgtgtcgaaagtgttggagaacctgcttgtcggcgatgaaagccaggcacgcaggcaagtggagcacaatcaggagcagatcgtgcaaaacgacaccaatgccatgatggggcgtaaacgcggcgtgttcgcgtctctgctcaactcgttctcatcgggttcggtcattctgtcgatggccgatgcggccaattccatcgtgcataatgacggcgtcgcagtggccgtaccaatcgtcgtatccctggccgtttaccttttcgtatggctgttcgtccagcagaaatattgttgattctctgaaaaccgttctgtttattggctttttatatgcctgagtgatgatttaccactcaggctaccacctatacactgtctcaaatatatgaaaatcggctatttttttgacgtcgtgaagcagctagagcggtgaaggcaggtccgtaatcgactccatctctgcccatttccaaccctacatggtgtcgagcctatcaatccgctgtttttctcatgtttttcgtgtttcggcttgcattactttatttactgcgctaatatagtttatatcaaggaaaggaggtgaacatgacaccatcggagataatcaccagcatctcgcttctcgtcgcgagcatcgcggccctcatcaaagcagtgaccggactcatcaaggagatgagacggaaaccgaagaagaggaagtgagcaagggttccggccagacttgggggccggaaccccacatctccgattatgccatgggacatcatgagaacggaatcgatagtcagcgcggtgttcgcgctcggaaccgccgccagcgcatggttcggctggccgttcgcgctcaccgccggatgcgccatcgtcagcgccgtcttcgcgctcagcgccggaaggaaggactgacatgaccatcgaatacctgagcgtcaccgacgtggccagacgtctcggcatcagcaccgccgccgtcagcgcctacaagctcccccagccggacgccaccatcggccgcacgcgcggctggctccccgagaccatcgaccagtggaacgctcagcgccccggccgcggcgtcggcggaggcaggccacgcaaaaacaagaccgaataacaaaaaagcccctccctcagcaatgctgagagaggggcgcgtgttacatgagggtacgaaaatcactcacggttaagtgttgggcctgaaacaggtgccaacacttatttttcgttggaactgtcctgcttggctgccgtgagctggctcacgccgattagagcgccaacgaacaatccgaccgcgttgattgtggtcacaatctcaccgcagtgtggcagtccccattgcgggccgaccgctccgacgagccatgcgacggccggcaaagcgatcaacgcgaaccacttgagcgcctgatacgtcttgtttggcagcaggtagccattggtattagattcgtccattccacacctccttaaaattcgaggccggtcagtgcaagacctgaccgggataaatcgtgtacggggcacgcaacccgttgcgttgggccgcggccggccagccggaaccgtagatcttccacaagctctcgcccgcggtgaccacatgcgaggtagttacgacatgggcaccgacactggaagcggtcgagccgccgtagcagacttgctgcccaggccagatgcggttgatgttgccgctgggcacgctccacgcgctggccggggtgcggccggaacgcgcggcgatcgcgctcatggtgtcaccggagctgacgacgacgcagtaggctccgccgttgtttccggacacgctgcccgaggatccagctagacgacggttgacgatggccatgacctccgcgtagcggctgccgagcagctggcggcgttgcgggtcgttgccgtactcgcctcggatcacggccgaggcgagtgtgttcgcgtcggcgaccggggctccgttggtcttgttgttcggcggcggcgtggtcgcgttggacgtgacggaggatgccggagcgccagcgtacttcgcccaggtcacggcgtcgccgtagaaccagttgacgtccaccgcgccgctgatgccgccgaccgcgccggaactggagtactgccacgcggccgcgaacggccacgggctgacgctgtacggcacggagccgggattacgcagccggtcgcccatgtagccgcgcggatagcccgcgacccacagtccggcgttcgtggccacgacggccgaccagtcgccggtcggaatcatggccgcgctcatgtagatcatcgggttgacgccccacgtggccttgacgcggttgacccagcgcaaagcccaccatgtctgcttgccccaatatccgccgggagcggaaggctcccagtcaagcaccgggatggcgcgtccgaccatgccgcgcgcgcgggcctcggacacgaatttatcggcctctgcttccggcgtgctggtctgcgggctggcgaaatcgtaggcaccctcgcggatgccggccgaccgggcggcgtcaagctggcaattggcataggggttgacgtatcccgtgccctggttgagcttgatgaacgcgaaattgacgcccgccgccttggcctgcgcgccgttccagcagccttgatagcttgcggtgtccacgccggtatcggccgacgcgaccggtgccacgatcatgcagatggcgatcatggcggcggcgaatggcttgcgccagtcacgcggcagtcgcttgtgtttcggatggcttttgttgaggatcttcacatcctctccttcctgccttttcgggcgataaaaaaggccatcccggaatgggatggcctgaaaaactggatcagtgcatgtgcgcaccgtggttgaagacgaggatgagcgtgcagagcagcaggatggcgatgatggtcattgttcctccacggtctccggcgccacgtccgcgcgcaattcgtccggcagatgcggcttcggatgccttttcaaaaagtcgggctcgacgatctcgcagaactgctgaagccaatggaaaaggctccttgtgtaggccgtgagcgcgaagtattttcgctgctggtcctccagatgctggatctgctcctcctgcgactcgacctgttccctcaatggcttgatgacggaatcggtgaggatgtcgcacgccttcgcggcgatgtccgcggtgtccttgcggcggctggagatggcgccgatgatggtcccgactcccccgccaccgactagggcgacgagaagcgacgtccagaattccgtgcttgaaaagaggctaagcggcgtcatccgagctccatgggtcgaggcgcttctgcacttcggcgcgcagtgactccgggatggattcgatggtgcgggctccggagcggacgaggttggtgtaaacggcgatcatggcttgctgcaaggtgttcatgcctgctcctttgcttcggaatcgttggcggacgctgtggtgagctgcgcttcgtagagggccgcgatggcggtggcgttgtcgacggcctgctgctcgagctgtgcgatgcgctccttgtcgtccattgattcgatctcggccgattggatgaggctgtcgaattgctcgaccacctcctgttcggtcaggtcgcggcacaggtaggtttcctgcgccgtgtattcggtggtctcggtgccgtcggttccaagatgccggacctgcttgatgtcctcgcggagccagatgtcggcgaggccgtcgccccgcctgaagtattcaatcttttccagcggtgtagcgctggtgacgagtttgctcatcttttttccttccttggttgttggttggcgcgggccagcgtccgcttggccatgcgcatggtctcgtccacctgccggcggcggcgcacgagcgtcgagtcggagtggatgaagtatccgtagtagctggcgcatctgcgcgccagtgtcaggttccttgggtgccggcggaatctggcgaaggtccgtccggcgcgcaggaatatgccgggtctaatgttcgtccggccgggccggaacgtgtagccgaccatgtcgatgggttcgatgccgacatgtttgacgttccattccgggtgcatgtcgagcttgagccggtcgtgcgcgaaggcggtgatgcgccttgccgcgatcgacaggtcacgcttgcttttcccaagcagcaggatgtcgtccatgtagaaaaggacgtgtgtgacgagccttctctgcgtggtggtgccgtccctgtgacatctggttttggtgagtccgtgctcgcagaaatgccagatggccgacagataatagttcgccaagtattgactgaggtaactgccgatgttcaggccgttatcgccgtcataggagtcgatgaggtggaagacgaggcgcaggagcgtcatgtcgccgacgtcgcggaagagcatcgccttgagcgtcgtcctgtcgatcgacggatagcatttgcgcacgtcgagtttaatgaagactttgctcgagggttcgcggatccatttgcggatggcgcgtcgtgcgtcgttggtaccgcggtccgggatgctcgcggtctgccatcgtcctatcttcgcttcgaaaagtggcatgagggcgatgaccgcgacgtggtcgaggatctgctgttcgacggcctcgcggccgatgacgcggtgcttgccggaaatcggttcgatgcggttgaagtatcggatacgtggatgatcgaatccgccggtcctgatctggccggcgagcttgacggcgagaccgtcgaggtctgggtggtgttccaggaatctcgtgacgtcacgtcttgatgttttgccttgcaggtaatggtctatggccttcctgacgaaggccggtgtgccgcaatgcgtgtggcggcagtaggttttcaatgagctgttcctatctggactttgcgcggctgtcgatggtgccggcggggttcatctaccggccgcgtgctcgtgttgcattttcggatctggccgtggcgtgccgtctggcccagatcgaggccgacggtaatcggagtgttctgatgttttcgacaggattgtccaggtatgcggccgccgatgttccacctgcggttcgtcaggtccctgttcaggttcgcgtggaacgcgccgcagttcgagccatccctgaggttgccgaaccggcgcacgacgcgaaggacggtaggcgcgccactccgagtcccatgtgtttttcagcgggatgatgagggggcttgcgccccctcgctgcgctcacccctcaccgctctcggctcatgccttcgagcggccgagcgcggataggcggccgccgatgttccacccgcggctcgccaggtcccagttcaggaacgcgtggaacgcgccgcagtccgagccaacccagaggacgccgaaccggcgcacctggcggagtccctgcgcctggaccggattggcgtagacggcgtcggtgaggccggtgctggaggtggcgccgatgccggtcggcaggaacacgcgcccgtcgacgacgttgaagtcctcggcgaagcgcgaactcgagtcgttggtcttgtcgcgggtcgggaattcgccgatgagcgtatagttgtcggtgctggtcttggatgccttggtgatgtcgtgcacgaggtagagggcgtcgtggccgacaccgtccgcgtcgaggtaggcgttgacgatggcgtccgcgtcgacctcgtagatgccgttgccgcgttcgatgccctgcagacgcaccggctgccatccggcgcggtcggtctgcgggcgtccgtctcccctgccgcggatggagtcggtggcgccggtcttccacggcatggtgctgacgaaggtggtggtcgtggtggtgatggcggcgccgtcgatgttgagcgccacgttcgtcgcgtcgatggtggtcttggacaggacggtgcgggcctcggccacggagtggttgccgctgttgttgcgttccttgtcggtgccgatgttgatggtggatccgatgaggatgttgtcggcggtgtccttggcgatgatgacgcgcttggcgttggtctcggccttggcgaccggcccctgggccgtgtagttttcgaagcagccgccgagcgccgcctccatgtccttggtggcgaatttcagcatgagcatgagctggaagtagaagacgtctggctggcattggccggcgtatcccttgcctttcttctgggcgagggtgatctggtcgttctggcagccgaagccggcatctatcttctgtccgctccaggagcgcggaatgccgccggacaggctcgcgccgtatttcgcgtagagcaggcagggacgttcggtgccgtccggcaggagcaggcccggcatcggttcgaagccgtcgtactgctcgtcgctgtaaagcaattcgatgtggttgtcgtctccgtcgatgcggaaatatccgggcgcgaccatgacgaaaacatcgccgttggatccatcgcggcggaatcggctgtcgccctcgatggcggtgatgtgcggcacgccggaatcgtccacggtggcgttcacgtcgcaccattggaaggcgttgaggtaggcgtagtcgtcgcggccggcgttcgcggcagtggataccgtcacggacaggttggcgttgtcgtgggtcttcacgcccgtgggcacgtgggagaaggagtagcgcgggaactgcacgccgtagatgcggccggaacggtgctgcgcatagtattcgcgaacattcgtgtattcgcgcttcgattcgtcgtagcggaaggtggtgccgtccacgtcggtctcgcgcagggcgcgcatgaccttagcgaaatcgcgcagacggatgaacttgtccggatttgccatttttgtcctttctgtcagttgcggatggcggccaacgcccaatcgatgtcggactggtcgatgtcggccaacggattgccggtattgaccggagtcaacgtggtcgaatccacttcgaccaaatcggcaaaattcaacacgttggccgaattgggcacctgcacgactcgaacgaacctccaggaatcggcgctatcgccgatggtcacctcgtaggcgaacgtgttatcggtcggcggcaccgcaatggtcgcggtgccatgcgcatccaatttcacctcgaacgagtcacgcaccacgatgcgcttaccgctgttgaaacggctcgtcggaatcacgtgaaccgtctcaccggccaagtcggcgatgccatccgcactcggatggccgaaatcgaatttgatctgagtcaaaacatcctccttaaaagaagcgttaaaaacaaaacccgtcgaaatcgacgggtttaaaaacatgaacggagaatcatggatgtggaacaataagaaacccacacgcatgtcaggccaacggcaacacgacaatgtgtgggattattcaacaagaatcgggaaggaaccaatgcttttcggcacattcgcatccactgtttggaaaccctcatgcgcgaaactccgcgaatgcactctagtgggatatgaaagcgccctgaaccgtcatatcctcccacaatggagcggaaaagacctggactcaatcacggtggcggacatcgaatcatggttggactccttcgacaagccgggagcggcgcgaaaagcatgggccgtgttccgtgcgattctcaggctcgcgttccggcgcggcatgacggacaatgatgtgaccagaagggaaatcagactcccccacctacgtcactatgagccgcgagtgttgtcggcgcaggaggtgcgcaagctgttgaaaggcttctacgggcatccgctcgaagcatggctgttggtgtcggtatgcgccggtttgcgccgttgcgagtcggtcggcatcgaatggtctgaccttgacctgcggcgtggcacggtaacagtcaaacgttccgtgcagtgggtcgcaggacatgagacggtcaccgagccgaagaccgatttgagccgtcgaaccgtggcgttgccgcgatttgccgtcaagcggttggcggaactacggcacggcacgaagaccggcagactggtcggcaatctgaacgcgaaccaagtcgctaaccgttacaagtcatggtgccagcgaatgaaactaccctctgtcccgccacgcaatctgcgtcacacgttcggcacgctggcaatcaaggcgggcaccgacatcagcgtggtcgcacgacagctcggacactccgacatccagaccaccgcaaggtattatttgaagcctgatctgagcgtcctcaaggacatgcagcgagcatggcaacgactggtgttgacctgctgaatagctttccgtaaccctgccgttcgggaaaagcaatggcaacggaggaatctatccaatcgggaaaatacccaatccgaacacgattaaggctttgaatggcagagccatactatcgtctgggacgacagtggcgattccattcatccacccgtcatacctgcaacgttcggtccaagtatcgattgcacctgatgggacagtcaatctgctcgttggtcctgaaattactgtcacaggtggaatcgtggaaatccatttttaatagcattccgtaaccctgtacaacgcgaagggcttcacggtcatccgcaccggcatgatgatgctcgtcagatactccggcaatatcggtaatggcagttgggatgcagtgcaatgcgaatacgtgctgcccgccgaactgcgcccgcctgtcgaggtcaatgcgatggtgtgcgtgtcgaacgggcagacgtcgagaacgctcgtcgtcaatccgaacggcaccatcagatgcgcgaacatgggagccgcgggcagcaatcagggttgcgtcggctcgctctgctatccgatcccatgaggatagttttccgtaacccagatggatgactgggttgtagtcgcgcgccctagaggctatgacgcctactgcgtcgcgtccatgatcttcaagccgaacgcgaacacgtcaatagacatcaagctgccgatcgaagcggcaaactggaattcatactccgtcgaattgcagttgatgaacaacgataaaaacaaagtgccgtcgttcaacaacatctcgatgattacgaacagtcattcggcaaaaggatttcagcttgtcgcatggaacgccagcggcacgtcgctgagctatcgcatcgccgtgactgtccacgtcttcgacgcgaagcagtagttttccgtacccacagacgcttatcacctcgcggcggtagccagaacggcggctttttcgccacaacgatgacctatatcgttgtctagacggtcgcaactgaaaacgatacgctgccaacatgccatgtgtttgcaggaatggtcgcatcatacgatgtgcggaaggaaactgtgtttcccacggcgtacagaaaacgattctgcatccggtcctcataggaattgtctacgaacatgttgaaggcttcgccggtggcctgcacgtccatgcttgccaaagccactccattccacgccttattgccgaaagtccctttgttgacccaccggcaatagacggtcgccaagccattgacgacgcatccactgattgtgaattccgggtcggaggtcagtttcgtgaaacgaatcggggttacggaaaactattccgtcatccaacagccgtgcgccgtggagtaggcggctttcgggtcgcctagcatctgcaccttcccgtcacgcgcgacaagcaggctgaaaccgcaggacgggaacgatatgatgctctgatcggcgagtggacggaacgcttcagggatggtctcaaccgccatcgtgtagttctgcactccgctgccgacgaacttgacgttgccgttgaccgtgacgatgcgtccgacacgacacagagagatgctgttttgcgtgtacggcggtttccattgctgggttacggaatcccacaaagcccccctcggcgtgaacaggcgcaccggcgtaccgaccgtgatgccgtcgagcgggatgcgccacaacggcatgtatgcgtcaaccgcgccggacaatatcttcccggacggaaccttcggatcggcggcagcggtcgcattcggcgaacccttcaacacgaccaattccaccagctcattaccagtcttggggttacgattgtaatgcgcgcagatgatgtcattgcgtttcatgccctgcgacccgttggagatcgtcaccgattcctccgccgtgatatgccagtccagaccctggatcgacgcgcagccggtgccgatcgtcgccctgttggacgaactcatcgaacatttgaacgcgtcgccccagtcgaacaccacgtcggacttcgaaaacttggcctgatggatgatcgccttgtcctcgcttgaaatatgcgcgactccggccttgccgtcaaccagttcgatggtcactgttcaacctccttcaaccatgcttcaaacgcttcatcgtccttctgcatgaacgtcatgaaagacgagttgcatttggagcataattcgtagatgtcgggcgtcacatcctccgcgatgcgggtcgccttgccagccgaatagcggcgcacggtgtaccattcacgcgcctccgtatcgccagcggcgacataagcggtcttgccgcacttgtcgcacacatacttcgagtaaccgtcagacttcactatccaatcctttcaaacattgagcagccaagcgaaggcaactgcctccacgtgccgccgaaatccacggaagggtcaacaccagtcgtgttcatcaccacatagccgatcgggaacgcgatcctcccggaagcgccgtcgccgacatgcgcgctgatcacaccgtcaacggagactatcgtgctgccatccaccttcacaccgcccaacacgtccgtggacgccttcggcaacgcgtaggcgttcgcgccccgttcgaccgaagcgagcttcgaccgctcatcatcggtcatcatgcccgatttggcactgtcggcaacactcttcgcatcagacgcaatcgactcggcattctcggcggtctgattcgccttgccgatctgcgccgagaacccggaagccatcctgtcagccgactcggcaacctgcctgacggcatccaaatcctcggaagcgacctccgcgttgatcgtgccgccggaaatcgacaagccacgtccagccgtcaaagacacgccaccaccagacgaagaggaagaaccggaatagttcgcattcgccgactgcaccggcagtccgacctcgaacgtcgaagccaaaatcccggaatcgattttcacgatccgcttcgtcaccacggcggtgacgttgacgccggaagcctgatccgtcgcaataatcttgtcatccacgcgcaggccatcgccgacctcatcggacaacgtcacctcgaccgacccaccggtctgcaattcctgcagatgcttctgcgtctcggattgcagcgtggacaaatccgcgttggaatagtcgtatgtagcgcatacctcatcggcgccaacaagtgtctgcgtctgactcaccgcaccggtcgcatcggcgaaataattgaccaccagacggttcttgagctcctgcgagccaaggccgatgagatgattcaccgcgcgacggttggtttcggccttgaaatccaccaagtcggaatcgatcgtgttgtcgatgatgccgaccggcgtgatgccaagcaggatgcgattatccttggcttggaagtcgatgcgtctgccgcaggatgcgagcagattacggaatcctgtgtaagcgtccacgtagcgtggattccggaacatccaattcgacaaagtggaagcatcggacgaatcgacggtaaacaccgaatccaaaccgatgcgcttcaaaaggcttttgaggatgtcaggcagcttgccggagacggtcaggtaatcctgattagcgtccggctgcaatatcttcgccgccaacatgccagtccacgattggccgatccacgtggccgtggacacgccaccggaaacggtcacgcgacggtcgatgatccggccgcccacgtcactgccgtcaagccagaaataccagccacgttcgatttctggcgcatccggatcgtcgatggtcagttcgaagtcgttttcgtcggtgccgcaagcccaatccaacgtcacctgcgatacgctcgcatgtggcgtcagcttgctgtctgcgatgataacgtccgccatggcacacctccagaaacgtcatacagggtcaaatcgatgccataattgccggaaaccgtcagcagtgaatctcctgccggtatcggctcgaaaacatacgagccgctgccactgccgttgccacgaacgcccttgtcgaaaacatccgaaacgtcgccgttttcggctgtcaccgttatcgtcttccgcaatccgatggccgacagcgacacatgaccgccttccggcactgtcacatcaaccgcgtaggtgttgccgccgatctgaaaagacgggttgacgcaggggccgaaaatgaccgcggtgaactcggcggccttgccggtcggattattcaccgtcaaagcgattttcgacggagccaaatcggtcggcagatccagtggaaggtcgatctgcgaaccggtgcctgccgtcatcgggaagaaatgctgcaccggcagcgcgcgactccagacgccatcgcaaaggacaattgtgtaatcgacttgcgcgtattccggccaaggcacgagaccaagcgatgagccgacgacatacgcccgctggaaccattcgccatctaccgtcaacgtgcctggcgtaaccgcctgcacgtccgaatcgaaagccgtctgcaccacgtccaatcttgacggatccgtggtgcggacggtcattttcgccgtcgaagcgttccggctcaccgatttgatgccgcgagtggccagcgtgtacgtccatgcgtacccgcgcatttcctgcaaatcagcgacccacagactatcgttgttgaggtcgatgaccatgccgtcatgcgacgtgtatttaagctcgcgcatatctgcggatcaacctccccaagtcacgatcgccggccatcgaatcatcggacgcggcgctgataatcgcgccaagatcgttgtgcaggctggttatcgccgccactacggaagcggtatcaacctgtatgctgacctgattgcctgtcatctgattggccgtggcaaacacttcacgtggaatcttccgctcgttcagcaagcgcatggtatcgacgccgtaataggccgtggccgcagcattgtgcgtgtactcgcccgctgcgagacgcgcgttgagcaggtacacgctgtcgctcaaaccattgccgggcgcccatgccggatccacgtagccggagaacatgccacctccggcgaactgctggaaggtgccgtctgtgaacatgccgccggtgtaaccaccctccttcttcgtgcgctcggtgacggtgaaggacttgtcggcgattttgaagtcgttgatagagcggagcaccggcgtggcctggtcgttgaccgaggcggtgcttttcttgtcttgcagtttcttccggttgacggcgtcgaccttcgatgacgccttgtcggtcgaatcaagcgtgttgcgcttgttcgccagcttacgcgaattcgcgcgggcgactatctgcgacgcgatatcgtttgatgtcagggtgttgcgcttgttggtgagtttcttcgcattggccgcgttgaccttggaagtcgcattgtccttcgcgtcgagtctggctgtggctttcttgccgttgagctttccgatgttcctggaggcggtgttcgccttctttgatgccttgtcggtcgcatcgatggtgcctttgacgtgcttcctattgaagtcgtccatcatcttctgcgccttcttggcgctggccgtggccttcttgtcgtcggcgtcgagcttggccttcgctatcttcttgccgaatttgtcgaggttggtctcggaatccttggtcttcttcttggccttggaatcgtcgacgtcaagcttcgccttgttgttgtcggcggtcttcttaatgttgtcaatggaagccttgatgctgtcggaactcaggccccaacggtctgccaaggcgttagcggcctgttcgctcatacccgaagcttcggcctgcctgatgatcgcgtcacgcgcgtcctgcagcacgccgttcgcacgttcgatctcaccgctactaaaaccggtgctctcaccctgcttgaggattttttcagcggcgttctgcgcgctgctggcgatgtcctccaaagcctgcttggtcttggtgcctttctccgagaatttgtcgagcagattgccgttctggtcgaagaccacgccattgtccttgcaggtgtctgacagttcgccgatcttctggttcagctggtcaaccgcctgatctgcagtcagattgccggactccaagccgaacaaggccttcacgaggtcgtcgatttcctcagacgcgtccgaagcggaatcagcgagatccttgttcgcgctggcggcatccttcgcggcggcggcagacttgccgtcagcatctaccgcgttcttggctgccttgcttttctcattggccttcttggaagcatcatcgtaggcctttgattcctctttcagggctttcttgatggcggatgccgcagttgcgccagggccgggcttgtcgatttccttgatctgcttgttgacgcgcttcaaggccgcttcgttgcccatggcggcgctggtcatgtcggtcaggctgatacccgctttgtcaagccatgtggtcaacttgacgccgccactgctcatatcctgataggctccggcgatttcggacgcgacatccgaaccggactccagagcgctttccagctgctcggatgccgccttagccttctgctgttgagaaacaaaagccgataacgccacgccggccaccgtcagcgcgatgccccacgggccaccgagcaggctcatgacactgctgccgacagccttgaaaccagcggtcttcaactgcgccttgctggcggacgtgccgaaagcctccatctgctcggaagcgctcatcgaagacgccctgaacatctggaatgcggtctgcgcggatccaagcgccgttttgacgcgttggattggatcgatggccagaccgatgttgttggccatcgtactggtgctgccgttgagattgcctgcggccttgtgcacggctccgaacacgccagccaatgatgccatgaccacgagcgtctgctgcgctccggacggcaatccggcgaacgcgtcgaccagcgtatccaagccctgcaccatcttgcgtaacgggccttgagcgccttcgccgacggaaatcatcagggattccatcgaaccgcccagattctccagatcgcccttgagattgttgttcttcgcggcggcctgctcggcggcgtagccgctttcggacacggccttcgtccacttgttgacgccggactcgcccgcctcgtacaggtagttcgcggccttgatggcatagctgccgaagatggtcgcgttcgcctggttgcgctgctcgtcggtcaggttcttttcggccttctgcaattggcctgcaaaattcgccatgccgacgaaatggccttgagcatcataggcgctgatccccaattccttcatcgtattggcggcttcggtggacggcgcggccagcttcatgagcatgctgttcagctgggtgccggcctcggcgccgatggtgccgttctgcgcgaacagggcgagcacgccggtggtctcctgaatgttcatgccgaaactgtttgcctgggcgccgcagttgttcaacgcctcgccgaaatcggacacgttaccgacggctttgcccgcgccggccgcaagcgtatcggccacctgagaagcctgagaccccttcaggtggaacattgacaaggcgttggccatgtattcggctgcatcgcctacggccatgccgtccgaggcggcgaggttgagggcccctgtcaatccgccggtgaggatgtcggtgacgctcatgccggccttgccgaggtcgttgatggcgtcggcggaatcggaagccgaatagacggtcgatgcaccggcttcgatggcggccgcacgcagctggtccatctgcgcgctggtcgcgccggtgttcgcctggacggtgctcatctgctggtcgaagtcggctgccatcttgatggatgcgacgccgaaagcggcggcggcgaggccggcggcggcgaggccgctggcgatgagcgcgctcttgcggccggtgttctccatgccggacgcgacgcttcgcgcggtcgatccggcacgggtcatcgccgcctcataggaggcggtgtcggccatcagccggatgacgatgttcttgttctcggccaaagcatcctccaaaaatcaggtcaaatgcgccaccaaagcgttcgcagccggattgcccctgccattcgcatcagtccaccgtttcatggcctgctgcatgtgcgcggtggcccagcagacgctggtctcggcatgcaatgtgagttcggctttcgggtcttggcagatcgagcgcggcaagccacacaatgggcacaacgaccgttcatattccgccaacgagcgcatccaattacgctccgtctcatcccattcgacctcatcgcccctgctcggcatccagcccagaaaacgcttgtagctgatgccgagctggcggcagatgcgtaggtcctcgactagttgcggagaacctgcgaggcgaggtcgaatgccgcttttgggtccgctgcggtgccgttcagttcggcgatggcctgccagagcggcgtgaactggccatcggtcaattcgtcgaacagattacggaacgcctgttcggtcttgtcctcgtcggccaccggcttgccgccgatggtcgcggaatcaagcatgagcggcaatgccgcggcggcggtgccgaacatgtcgttcgtgccgttctcattgcggtgcgcggccaatacctgcgcccacttactcaccggcagtgctcgcaacgtgagcttcaatgtctccgcatccgcctgctcgcgcagctcttcgatgcgccgcgcggtggccttcgcctgccggttcgtaccggcctccgtaatctgttcgcgcgtggtctcctcggccagcgtatcgcccaatcgcgcaatgtcctcggcgatctgctggttgaggataatatcgacctcacgcgtacgcctggtgactttaagcatatgtgttccttcactctaatattcatgtccctttgccggaaaagagaaaaaaagagtatcccgcaccggcgaaaggaacgaaagtccgatgcgggaagaatgaatcagaccaccttcacgttctcggcccaaccgggagcgcgaacggagaaattgaccttgctgcgcagcacgctgttcgcggcgatcgccaccttggcgctcatgccgatgcggaccgagtagacgttcaccacgtctccggctgtgaaggtgttgtcggtcggcttgccgtagcgtcgcacgaagtagccttccgccccctcggtcaacgtctccatcgccatgttctgcgtggaatgcgaagtgttggtgttgtcgatgacctcgatgcttggaccgctgatcttcttgcgtccgggattttcataatcctgcgcgctgttctcgcgctggtcggagatggaatcctgcgacggcgagcacgaccagccgccaagggtgacgtagttgctcaggtcggtgccgacgccgatctccgcagcggtcggcttctggatgtttttgatggacggcacccagatcgtgttgaccagaccgtccgccggtgtggaaggaacttcagttccaagagtcaaaaccatgactcctccttataaatattgggtcacatgcgtgaccagttgaatttgaaagtcaataggcgcacctgatagagcaggctcgtgtcctctgcggtgagtccggccgcatatgcgccggaatcggagaacagggtcagacagccggtgtcgaagccctgcgcgacgaaccgtttgccggccaaggctggaatcatgaggtcatcggccagcacgttgacggaatcggtggtggtgctcacaatgcgcaccagcagagtgccgatgccgcaatgcacgtgttgcgtctccccgactatgtggccgttcgtggtgacggtctcgataatccacggtggcttgtcggtcggtttcggcgcggtctgccggtacaccttccaaccttcagccggtttcggcacatggtcgagaatcgtgttcgacaaggtcattatcgactgcactagaatccctccactgcggcacgagccacatattccgcgagcttcggaagctcttcctcgccatgctcgtagaaccggtgcgttccaccacctttagcggttccgaagaacgcgatgttggcgaggctgccggcgccgcccttcgacgggccgatctcggctgtgatgcgtcccggcgcttccttcacctcgtaggtgatggggatgcgtcgaaatgccttgttgcccgagccggagaggtcttcgcgaatgtcgtttttgacgttctgcgcacctttcttcacgaccatggtgatggccgcgcggcgggcgactcctttggagagcagcttgtcggcgaaggcggtcagctcggacgcgtcgaacaggcttgtgacgctcatgcgtcctccttcacgttccagcggcaggccgtcgccaacgacttctccgattggggggaaatcatgcgatagcgacggcccaccagttccggattcgccgacttcgtgaccgtgacaagatcgccgttgcgcaggctggtcccgaacgggaagtggatgtacagcgaccagaccaatgagacggctcccatcgactgcgccgcgctgccctccacgttctcggatgcgaggccgccggaggtctgcaccttgcagcggcccgcatacacctgcgtggatgccggcttcacgacgcccgtggcggggtcggtgacggcctcgccgggacgcgtgacggtgcattcgtcggtcatgagcgattcagcgttcccgcgcgcacgctccaacacggatggcgtcagcataggccgcgcctgcctgcaggggcgatggtgaacgcgccggaagcgccataatccgagggttccagcagcctccactcgtcatcgagaatcgtgattgtcggcacgctgttcgtcgtgcctaccgtctcctgataatcgtcgattctggtgcttttggaagtcgtgccctccggattgcgcgaataccgcgcgaccgccagagcctcgaccagatcgaccgtgcgctgttccaaacggccggtctcgatgatcaggtcaagattcggcagacgcttgcgtatcgtgatctcggcgagctcgatccacgaggagatctggttgacctccatcgggtcggttatctccctgcagagctgcttcgcgacgtcctgtacgctggccgtcatcggatcaccgccttactcgctggcggcgagaccgcagtcgcgaagcgagccgatgagcgcgttgagctgcttcttcgtctcgttcagggcggccaccaccgcgttgaattccgcggcggtcggagtctcgccggcggcgttcgccgcgtcggcggcctgcacggtggtggtcacggcagccttcgggattctgactgtgccggtgttcaccgtgatcgggtttccggaatcgtcgacgaactgcacgctgaccggcgtgtacggcgcttcgggcttctttccggaagcgagtgttgcgtaaacggtgctcacgataaagcctccaatcaggcggtgatagtgacgaacttggtcttgtccttgaccacgaagccgatctcggcttcgatgaggaagccgatcatgtcacgctgccaaagattgatggccgttccgttgtcgttgatggtggcctggtcggacaccttcatcttgatgccctcgacggtgccgtagatggcctgagtccagtcaccggccacgccgaagatttccggcttcgcggcctgccccttgccgcggtcggcggtgactgcggcgacgtggccccacggggacttcacgacacggccgccgaagaaggagccgagagtggtggaatccggcatcggcaccagaagcggacgcccgttcgcatcggtggcctgcaggaactttgacagtccgtgggggctgagcgccacgccgttgaaatcgccgtcgttctcaagcacggtggtggcgatgttcgcgaaatccttgtagccgcccttgccgatgctcaccgtcttggcgtccgagagggaatccacgttggactgggacggcagaccgatcacgccggtcaggaacgtctcatcgatgccctgcgcgatcgcctgggatgcgcgggtcttgatggtgttccacaatgcgctcttgtcgcggacgaactcgttggacaccgggatgatcttcgcgagcttgaacggcttcatgatcttgttgccgatgtgcgggcggtccacggcgatttcctcggtctcgcccacccatgttgccgcgccggtgtcggtcagtgtgtcgtatgcggctcctcggcccggcagtgcgaccttcgtcgcaagctgggtgacggcggactgattcaaggtgtcggtccagatctcattggactgttccggcgtcagatagacgccggttgtggcgcgattcaaatcgattgcggccatgattgctccttaataaggtttgatggttgtgtctcaaaagcccaaggcgtcgagctgcgcgccgaagacagcggcgttcgacttcgtgcggctatcggggtcggagggatgctgcgcggagccgaacaatgcgtccagaccgttatcgtcatcctgacgcacgcccagatccggatactgtttcagcaatccgtcgattgcggcgcccaccgccttctggtcggatgcgtccagttcggacgtgtccagcagcttcagggcgagttccgggtgcgcgagcctgcttgaagcggcctgctggatcttcaatgctgcgatctcggatttcagctggccaatctggctggtcaggtcggcgatcgtgtggctggatttctgcagcgcgtccttcatgcggtcgagtgcgcgcttgcctttgtcgccgagcgcggcttcctcttccgggcttgccggagcgttgtcggactgtccgccctgctgcggttcctgcgtcttctgcggcggttcgttagccgcagcagcgttcgcatcatccgacgtgtcctgcttcgcgtccttgtcttccggctgcttgtcttcggcggaatcatcaccaccgccgacgagggcatccaatgccttctgagccgcagtcagctcatcgtcgttttcgggctttgccattatgcatattccttccattgcggattcggatatgaaaaaaccgccgaaaggattgcccgatcagcggttgaaaaatcaatcggctagagtatccagccgtagtcgtaaagcattcggcgaggatccttgccggtcttctcgcaaatctgatagattgtttcgggcatgagacgcggacggtccaccttcgtgtacctgccgccgttcttcacgaattccttcgcatatccggcgcttatcatgcgacccgacgcgaagccgcgcttggtggtaccctccaccgtatatttgatgcgtctgtcgtagacctgcgccgtgctgacgctgcccttgcgacggtaggcgttgaccagctggttcagatccgcgccgtccttccaggcacgcgcgttcgcacggctgccaagcaccttgaccagctgccggtcatcgagaccgtccagatagtcgttcgcgctggtcactgcaatcgaaggcttcttcgcggtcggcacggcgatgcaatcgcagcgcggatgccgttcgaacggctcgctgccgcaaggccgcccggccaacacgacgcacctgccgcagctcggcggcgtcaatccacgaacgtagccaacgtaagggctccgcgcgtgaccagccacgatggcggccgaacgctgagtatccgccaggcatgtacgcatgcgcgcctcgaatccaagctcgatgacatgcaatgccacatcgacggtgccgccgttggcgatgacctgcttgccgcgcgtcaccgcaccccacatgacatccaaggtgtcgaagccgttgccgttcacgccgacccactggtgagggtctgcggaatactgcgccggcaattccacgcggctcattccgtcaagagacgccatagattcaggcgtcaactccagcgcttcactcgccgtcatcaactgggcgtcatccagcaaaccgaacatctctggcatgcacagggcgaacgattcgccgaaatcatcggacgcgttatgcctccacaatgccgtcatccggcgtgccagacggttgctcctgcgtcgcaggtccctcgcctgaatccgagcctcctgtggaagcgtctgaccgtaagccatcgtccacctccggcttcaagtacccataatcggcggtttcgtcggcttcgagcagtttcttcgcgcgggctatcttctccggcccccagcccaattcctcccatgccatctcacgcggcatgagcggccgtccggctgtgtcggagacgctgtaaagcttggtgacggcatccgcacgctgcgcgaccgtcggcgttccagcgtcataccagagcgcatccgcatcattaaacgcggccatcgcggcgggacctgacaccaatccagcgacgatgcggcatgtttcgacggcctgactgccaagcgtcctctggtcacgttcgatactcttcaccagcttggcctcacgcgagcggatagcgtcggcggaagcagcatcatctgcagccaatccgaagtagttcggcggcaggccggtgacgccggaggcaaggcgggcgtacaggttcaccatacgctcgaagttctccatgctgctgctggagaactcgaaggtcttcgcgttcgcgttcttcaaagcccagatgcgcccgaaataagcctcccacgtggtcaacggcttgccgtcatcaccgacgaaatcgcccttcgtcgcgccgagcacaccacgctgcggcacagcgtgcgtctcctgcgcgacctgcgcgttcgtcaaatcacgcgcacacgcatccgtcaggtcgatcacgtcagccaacgccgaagtgccgcgaatgcgcggccacgctcgatgcaatgggatcgtggtgcgcggattacggtatgcgggcaccacaggcaccacgccaagcggattacgctccacggcgatgacctgccaggatggtgagaccgtcaacgtcgcggcgggaagatacagccgccatgcgaccgcgctcatgtaatcctcggaatcgacatcgcggtagcggcgtagggccgcatcgatgcttcccgtgaccggattgcgatgcgcgatgatgtcgatcggcgacacgttctcgatcaatggcccggcaccgttcaattccacgaccttgaacgacctgccgtacacctcgaagtcaagatagctcgactggtcctcgtccatgccgcaggagcgccacaactgccaggcgtcatccgccagctgcaggttgtcgcccacacggaagcctttcaaatcgagcctgtcaacgcggctttcggcgacaacgcgcggccagttcacaatgaccgtaaaccgttccagctcgggcgggatcgccaagccgagctggcgcagatgctgcttgccgtcaacataccggtcgagcttctgataatgcgccgcaccagcctccatctgggtggaaagccgcacaagcagctgctgagccgactcgggaagccacatgatccacctccatcatctgaaaacgaagaccttgttgtcatcggaaccccaacccaacgcgcgcatgtcggacgccgcctcgtgcgcgaggatgtcggccatggtgatgtcgatcttctgattctcgctcggcttgccgagcacgtacttgtcaccgggcttggcgaccttacgcgcggccatcatatgcaatctggccatacggtccatggaatgcgtcgtgctgtggtcggcggtatcctccatgaaacgcgtgagcgcgtcgaacatgcgtccgatgcggttcgtcggccacggaaccacgatatcctcgccatactggcagccccacgcctccacctgagactcccaagggtgcgggtcacagtagaagcgcttcacatcataacgattgaacatctccgagacgcacgcatcgacctcgcttcgcgggatgcgcccctcccattcgacaggattccaatacgccggacgattggaaggcccataggtcggagtccaccgccagccatcaaccgtctccgcacgaagcgcagtccagtcaccggactgggatccatcgaagccaaggcagatctcggtgccgggcttcggcggctcgcgatccaccatcgtcgcatcgtaaagcgcctccggcatataactgccaagaccctgcacaatctcacaaccgtaaaatcgacgtgcctgggcgggatcgcgggccataagctccgaagccgtggcctccacctggtcaagcggcacccacggcgaccccgcgtacacgaattcaagaatctttcggcgatcagccggatccgcgaaatcgagcgatgggtcatgcttcggaaagaacttcataatgtccgacgccgtgctctcgtaggtcatctggccaaaactggcgtccatcgggtcccacgggttcgtcaattccaacatgcggccatccatggccatagcgccacgcatcaccgtgtcgccaacctcgaacatgccgctgcgacgagtccaaatacccgactcgtcgccgagcacgaaattaaccggattacccagcttggaatgagccgaagccgtcacagggtcgatgcggccgccgttcggaaggcggatgaaaccctcacgcaccttcatcaggtcggacaggtgcccgttgcggaccatggactgcaaaggacggtagacgttcgccgtctgctcttcggaagtggcgagcagctgaatcaaagcggtacgacgcggcatgcccatcggctcaccaggtgaatacacgtactcgaaaccgcaggagcagccccagtcggagcagcggaacgtctcaccgccacgagcccacccgcagaacacgcaaggcccaacagcctcgaacgcggccacggcagcgccgaacggcgacttgccgagcttctgaccaccgacgatctggccacgacgccacttgtatgccgcagcctgacgcggacgcgccggatcatacaccgcatccgacttcacccgataaaaatcgatggcattctccagctgccagccgaccagttcgaacggcttgcctaaatcatagccattaggcacaacacagtgcgcggcaatccaatcggcaaagaggaaaccaagagacttcggaacaaccggcgttttctgctcgctcattccgcatcctctttctgattctcaagccaccgctgcttcgcgcttttgaacggaatgatcttgtcggaagattctgctgagcgtttcggcttcggctcgtcatcgacaatcgcccaaccattcaaccgcaatccttgtggcgtcaagccgattgtgtcggcataccgcgcaagcgcggtacgatcagcggccttcgcttccgaagactcacaaagcacgaactggcgcacataaagcgcaatcgtcgtgaacatgtactggtagcgcggcatatgccatgcgatagcctgcggcagacgccaaaggtcacgccacagttcacactcacgccgattccacgcctccgtggccttctcgtcgcgctccttatgaaaaccgtcatcatccttccaagtgttccaaatcgtccactcggacagcggaaaagccttcggacggtaacggtagccgcgagatgaaagcgggatgatgtcggcgccaagtccacgcgcgtcagatcgtgcgctggacggatccggcatcggaccggagcgggtacgtgcaccgccatgcgtcgccatatgccctccaatcctcgaaccggaaaaattacagtctcgcccagcccgtcaaatcttgaactatccgcgaacttgcgagtcccctcaccggcggtctggaaaccacctcgagggatacccccctaggggtcttcgccgagaacagaacagaaaaatttccggtttcacacgcatttcagcgcattccatttgcgcccgacgcgacgccgaacgcaaacggaaaagcgacaacgacatcattcacgtctttcaaacagctcaggcaacagacgaacggaacgagacgaacggaacgaatcgaacggcgctcgccgacgtcaatgccaacgttcctgatggctgatcgctttatgctgtccgtctcttcgattgcagcttcgatgttcgggacctgtccaagccttgcggtcgtcagtgtggccgaggtcccatgcctgcgatggaagtacaggctgattgcatttcgcacagactggtacaacaccggagtccatggccgcctgccaccgtgctcgctccctgcggtgcgcggctccgtatccacgctggccggacgtgccgcgcccgcgctcataggcgtgagcgtgagccttgcagaagcgcgtcccttgcgggacaagctgtgggcaattgtgccaggcgcatcggcgaagactcacggcagacacctccagcctctggtggcgggtggagcgtccggcatgtctggggtacgtctcccgcgaaggtcccccagctggccacccccgattcatgggccaccgacacaacgggtatcgccgccatggtcgacgtccttcggtgcaacggctccaagggttgctagtggctccacgccgaacagcaacgattataagcatgtgacattctcccccgcctacgctaacgctaagaggcgggagaattctcggcaaaatcagttaaaagaaaagcaccagacccttcgggcatggtgcaagttctcttacagattacgcggactcaccctcttgcgcaagccgcgtgtcgaccagctcggcttgattgaattcccacatgccacggccgatccgccgtgccttcgacagcctgccacgagtcagccagttggacacctgcttgcgcgtggtgcgcagtccggcacggtcggtcagccagtcggccgcctcggcgggcgaacacgtcataaccgcctgcccagcctcccccagtctgccggccaccagcatgtccaagtccaaacgctcgccgcactcaggacaccagccatcacgcatgccttgtggcacggccagcgacgccgaacaatccggacactgcacgacggtcacgcgcccatccgacggcgtgcacaacctatcgatacgccgaagcatcctgtccagccgatcggccagctcgcccgcagccggagaacacaccacacgcgaccacgacctgcacaccgcccgatacgccggacgccacccctcgaccggcagcagcatccacttcaaatccacgcaaccagccaaccgaagcatcaaacgggccgcctcctcatacacctccaaccaatgcacactcaccggcagaccgaccgaacctccacgaacaccaccaccgcgctcgccgatatgagccttgcgttcggcgagcgcgcggagttccgggatggttttggcgagactggcgatttgtcgtcgcatgtgtttggcgcaggttttgcagagggtggtttgtgctggttcgccgcattgttggcattgactcatggttcccgctttccggctagaatggtggttggtttcttggaggttccgtccggattggcggggcctctctttttattcgccgccttgctgggcaatcttgctgatgagcatgcggctgatgttgttctcctcgtctcgctggtcggcttgatcgagcatgtcggccgagtcctgcatcaggtgcgcctgtttgagcgccttggatgcttggacggtggccatggtgagcgcgtggctgatctggatgtcctcgctgccgctgagggtttggaggtcggcgagcgcttcgctgatgtgtttctgcagtgcgatggcctggcggcggatggtttcggccgcgttgagacggtttacgcttttgtcgatgtcgttgctcattgcttattctcctttgttggttcgttcgtggggtcggctggcaggctgccgatttgggcgagggcttggtcaagctggcgcattggttgggcgagcgcgtccggcaggcccgtgatgccttggacggcggcgcggatacggccggccgtgtcgctcatcgggcgtccctggtggccgtgtcgatgcgctgctcgccgaggctgatgtgctcgatgttggcccgacggcggaggatgagcgcgtattcgtccatgacgtcaagctgcctgctcaacaggctgatcgggcaggtgggctcgaaatcgagcgtgccatccgcatacctttgcagcatgtccctgagcctgccggcgcgggcggtcaaatcgcggtattcgacacgcatgcggtcctggtagccggaggccttggcgctcgctggttccgcttggtcggcggcggcgagcacttcgatggcttggcgcaggtatccgtcgcggatccattcggatgcggtattccattcctcgtggatgatttcggtggagtccttgcggagtgcccatttgagtccgaacagacgttcggcgacggcttcggtgcgcgcgtcgatcggcggcagtggcggggcgagtgtttccttactcatggtttcctttccgttgtgggtgggatgattttcggccgattcccagatgttgtgccaaagcatccggataacccaatcgggcatttcggtccagatggtcaagtgcgtcgagacggctgaggctttccaccacctgccgcagacgacgcagtgctgcagacggtggcgagggaaggtgcaacgccctggtccgatgccgttgctggcgcagatggcagtgccgagagcgttccggcacagatgcggggtccggtctttcattcaccggcctccgattgggacaggcgccactgctcgaaaagacggtagacatccaacgagatggccctcaccggctggaacttcatccgccacatgcagtcggcacacacctccgaggcggtcttcgcctgatccatataggcaatatgcacggcatagaccggactggacacccgcctgccacacaaatcgcacgtgtgcatatcctgcgtgaccaactcatcacgctgacactggaacgggttccgagcatcccgctcctccacggcatcggcgagcgcctcccgaatcttgtccctggcattgatgtaggcgtggtatcgaatcgacgcactttcctcgaggggtcgattgccaaaacgcattccggcgctcgcggcttcgagttcctgggcgatgagtttgttgagcacgtcgatggcgatgtctgcgtcgctgtttctcattttgtttccttcttggttttggcacattccgggcaaaggctggcgttggggtcgatggaattgacttgccatccctcgtattcgagccgatgcagaggtccgacatcccacttgcggcattcgcggcatgagagatgacggtggttcggacagaggctgtcgcatggataatctcggtcgatgtgccatcccgcggcttccagttcgtccggcgctccactgtcggtgatgtcgcagtcatggcattcgacgtgccagtggagcgggcagtagtgcctgccttggagctcgtcgcattgccagccgtggtcgacggcctcgttgtcggcgtcctcgtaggtcgcgtcatagacggaaaggcttgtatggcactcgtcgcagacgacgaacagctcatggatttcccggtagctcatcttgccggctccttgtccgctccgctcacatggctccagtcgcaggacaggccgccttgctttccccatgcgtagacgatgcagtccacctttcgtgtatcggacaacgtgatggcgcactcgtagaaaccatgggcggtgcctccatcggtgcattgcgagtcgatggacctgaccgcatgcgctggcgtggaaggctccgacgcgctcccgcatcccgcgagaacggtgcagagggtgagtgtgatggcggtaagtgtggcgcagatggtgtttctcattgggtttcctttttcatgtgtgtggtccagtggttccattggttattcctttccgtagacggcgagacttcgtatgccgtcgctcatgctgttggaacatgtgttcggatcgtggtcgatgatgtcgtttccgatgccttggaatcggagggtggcggtgccgtccggccagcggatgagttcgagtcggccgtcgatgacgacgtcgtcgtcggtgcgggcgatgcagcggcggccgatcaggatggccgggtcggccgaccgccatttatgcagcgggacgttgacgctcaccgcggctcctcgccttcgtgttcgttcttggcgtcgtcgtaaccttcgtcgtacacgtcgtcgagcatcgtctggaactcgggagaggcgaagaacgttctgatggcgtccttggccacgcgcctccatggctccttgtcctccgtggccatctcgttccatgggcgtggatggcgggccccgttgcgatgccagcgcaggtagatggcctcggccaccttgttctgcgtctccagaccgatcggtatggtctcctggtctgccatgatggctcctttcagtatgtttccggcggttccacggcggtgcggtccgcaatgatgtaggcggcgagcgcgacgcagagcgcgaggatgatgagcacggcgtgcagggcgagccattggatggggatccagtgatggagaccgtagccgatgatcggccggatgatggcgtgcggcacgagcagcagcgcggcgagggagaacagcgtggcgaaccagtcgccgacgcggttgaagatgcggttgatggtctgtttcattcaggttcctttcagtgtgtggcggtttcacggccggttggccatccagccgatcaggatggcggcgatgaggaggatcacggctgcgatgtccatcaccttgcttctttcgtggcgacgtatcggaccggatgggcggcgagttggcggatgatgcgcgcgtattggcggatgtcgcggtcgaggcatgtgccggtgcggtgggcgctggctgcgggcgtctcctcttccggcctcacgtcccagccggcggcttcgagactgtcgcggatggtggccatgtcgatgcggtggtagtgcagcgggaggttcgggcagagtcgggtgatgaagtcgatgtcgaactgcgggttgctgcctgccggatggagggtgaacgattgcgcgaggctgtcgacgtattcctcgagcgcgttcgccgtcgcctcctctgtatatccgccgtcgagagcgtcttcgagtagtccgttggcgcagtgcatgcgccacgccttgatgttcccgtccgtaatggatgccttgcggccttgcagtccgatgacgcggcggaaacctccgacgcaccgcacgcctctcatgtcggtgcaacgcatttccacctcgaggatcctgtcatggtccgggtcgagacccgtggtctccacgtccacccacagcagcatgtcctctttggctttttcctcgcttatcattggtttcctttcgtttgtaggagaatgatttcggtctgcgtgagcggtgtcgcggtaccgtccatgttcagcagcatccaccggccttcccagtcgaacaccggcacatcacgcggatccgcgccgaacggcacgattaatcccagtcgctccgcctcctccacatgctggtggacccaaccatggcatcctgtgtcaccgctgccgcacagctcgatgatgttgactgggctgtgccgcacatccggatccgccgcgcggcgcagctgacggtgatggccggagcgcccaggccatctggacgggtcgtggatgttcgcgccgcagcgcatgcaatgccacccctgacgttccagggcgatgcgcttggaatcatcgaactcactcatggccaacctcctccgacaaaccatcgaccagacgcatgcaggccacgcaattacccctcacgacaccggcccaccgagcgatctgcccaccatggtcggcgagcgctcgcagttcgatggtgctggcggtctgggcggtgtcggcgaggagacggctgagtctgtcgagttgttccctggtcattggttgttctcctcgtcttcttcgttttcgtcggagtcggcttcgctgatggcggcgatgagctggtcgaggtggctggtttcgtcgtcggtgggcgtgtagccgaggtcttggaggatctggtagtagccggggatgcgtctgctggtgtcgttgacggtggtccagtcggtcgggtcgatgaaccattcgatgcgtgcggcgaggatttgcaccgcccagaccgcccagtcgggttcgtcgaggtggtagcggagttcggcgagcgcccgttccggttcgatgccgctgatggtggtgaattgttcgccaccgcatgcggcgtcgttccatgtgctcagcgccagcgtgtagccctgcgggttcgggtcgatgatctgcaggagtccgagccgggccgtggtttcgacgagctgggcgcgtttgacgccgtggagatggccgtggagccatgccatgcgcttgtctgcggatgcggcggcgtattcctcgagcgcgtgccggcgggcgtcgcgttcggcttgttcggcggctcgttgggcttccttttcggcgtcggcggtcttgtcgcggcgggtccagaggtagacctgctgcgagaccgtgtggatggatacggctgcggggttctgttcgcggatcttctcgatggcttcttcgggggtgccggtggacgggaacatgcagccgaggtagcaccattccgggtcgttgaacggcttttcggggtcggggatgaggttgatgccgttgtcgggctccccgaggagcgcggcgaccgattcgatccattgccggtcgttctcatcgcgttcgatgcggctgagggtgtagtcgaagttcgaggtgccggccgcctgcgcgagcttcttctgcagatccggctggccgtcgtatcgcgctatggccacgagctggccgatggtgagctggccgaaatcgtcgcgggtcgctctgacctcggtcttgatgctggcggccttggcgcggtcacgcacgtagtcggcgcttcggccgagccggtgggcgacgttggcggtggtggctccgaggtcgagcatgccctggatggcatcggcttcctccaacacggtgagctgttcgcgctggcagttctcggtgaccatggcctccaactgctgcaatgggttgagctggagcacgaagcatgggacggctctgattccggcctgtttgcatgcggcgagcctgcggtggccggcgatgaccctgtagcgctcgccgttgggtacgacgctgaggggtgtgaggaggccgttggttttgatgctggcggcgaggtcggtcacgtcgccgatgtttttgcgtggattgtccgggtgtgggtcgatcaggctcgggttgatgagcttgatctggttgctttggtagctgctcattgcttctccttgctggtttcttggttgttgagttcgtctgcgcacgcttggcatgccttccaccattcgcttgggttgccgttgcggaggcttccggtgtggtcgtattcgtcctcgtgcggatccatgagctggtggacgtgttcgcagttccaggtgtgcttgtggattggtgttgacgggactggttcgggcgcccaggtcttccactggtcgcggagccatgtgttgagccgtgggatgtggccgctgcggatttggccgtcgttgacggcgcgcttgtagcggcggagcgcggtctggagtcggccgagttcgacggggtttccggcgatggccgcgtacagggctctggcttcggcttcggtcttgcggcctttcgcgccgacggatccgggataggcttcggcgaaacggtcgaagccggcgtccggcgtatcggtttgcttcgaggtgctggcgggaggggtcggagagggtatatcggtataggtatcggttttatgccatgtttttgcttggctgtcctctagcaacttgctagacgtttcgctacctgtctcgctactgttttgctctccgttcgcttggctgtttgctagcaagttgctagacggttgcttggccttttggttggcggccttacgccgtcctcccttgcttccggctttgcgccgggcctcgcgctgttcctcggtgagcgtcttgggttccttgcagatgccttcggcgtagacggggcgccatccgccgccgcgctcttccatgagccccatgtcgatgagctgctggagttgtttcatggtgccgccggcgtccttgaggtcgagcttgtcgaagtatcctggatacgcggccgggtccttggcctgcatcgagatgcccttggagtggatgacgcagagtttgacccacagtcccacggtggcgagaggcaggcggcggatgcgcctgtcgtcggccatctggtcgtcgatgatgaaccacatctcttcttctccttcctgtggttcagtcgatctcgccggtgtccggatcgacggtcgcctccacgtcgccatcgtccatgtcgagactgcggcgcaggtcgtcgatgaggatcatctgccgtgacgtggccggcttcgcgcacatgttctccatggccaggccggcgtcgaggatgcgctgagcgaggtctgcgcagtcgtacacggcttcggtgatggcgtggatgccgccccacttgtcgatgtgctcctgcttgtttttggtgtccatgacgttgcggcatgccttgagcacgacggccgcggccttggtgacctgctgcgtcttgccgatgaggtcgatgagcgtgtcaggtgtcgcttcctgcgggatgagcgcctgttgttcgctggctttcattgcttcctcctttagaattccggttccggatccggtttgccgaagtccccaaatgacgattggtcggccgccggcgcgccccacggatcatcggccggcggcgcggcgggttgctgtgtctgcgccgactgttgcggccgttggctccagccaccgacgccggtgttgacggtcggctgcggcgatgcggggttgccgtagacgggaccgccctggcggctgatgcgggcgacctgcgccgtcgcgtaccgcagcgatggcccgatttcgtcgacctgcagctccacgacggtccgattggtgccgtcctgcgcctgatacgagtgctgtcggagtctgccctgagcgatgacgcgcatgcccttggccaatgaccgcacgcaatgctgggcgaggtcgttccatgccgaacagcggaggaagagcgcgtctccgtcctcgtactggccggtctgccggttgtactggcgtggcgtgttggcgatggtgaagctggcgacctgcgcgccctggccagtggtcctcagttccggatccgcggtgatgttgccgacgatggtgatgacggtctctccgatggccatgtcagactcccttcacgtatccggctggctccgggccgagctggctgggatccttggccttccatgcgcatttcgcgcggaggcatccggcctcgcggtcgatgatgatgtctccgaagcgcgccggagcgaccagcgtgagattccagctgcggtcgcggttgagcgcggatatggtctcgtacaattcgctgatgagctctgccgccgtcatgccgatgctggtcggcgtgagtggccattcgaaccaccgctcgccttccggcctggctgcattgcttggcatcgtgtgcctccttcgggattggattggatgtcgtgccggagcgcggaatcgaaccgcgcatccatccgccggcgctgtcggagcgccgatccatggcacccgcatcctgtcgcgggctccggcgggacagacgggaggagaagaagaagatgacccgtccggccggttttagcgtctttcccttgacggttgggtggctcccgcatggacgcgcatgacgagacacgtccatgccgcaatgtgagcggagccatccaagtccttcacttctgctgctccagccatcgcatgacgcggggatccgagcagatgcggcacgtgacgacggccgcggggatgagcaccgcgatcggcgcggcgatgaggtgttcgatgggatgcgtgcacgccggtgtgcagtacagcacccagatagcggcgatccagatggcggcgacgagctggcagaggatggcgtgtgcgagcttggtcatgattcctcctcgtccatctcgcgcagcagacggccgatgctggcctgcagcgattcgagcgctgcgcggctgatggtcactccggcgaggtggccttcgtcggtgatgatgctgattcgcgcggccttgacgtcggctccgcacttgtggtcgcggatgaccatgacggcggagtggtctttcggcttggattccttgcgcatgtttgcctccttagcgccggcgcgtcccggcgttggcatcgaattcttcaatggatgcgacggacaccatgaccttgccgtggtatccgcttggctggcgcatcttgatccgtcccgctctcgcccatttgcggagggtcttcttgtcgacgccgccgagcatcgcgctggcctgtttgagactgacccagcgtggcgcgtatgccgtctgccggacggcttccttcgcgatttcatgggcgagcgcgacggggtcgaggagtggctggtcgatggtggttgattcctgcatggcgcgtcccttctcaggcgacgtcggcgagcgcctccgcatcggagatgatgctggagagcttgcgtcccgtcgcttggctgatgcggaccagttcgtcgaagttgaaggtgccgccttggattttcctgttgaggctgttgcgcgggattccggccttgattccggcctgctcctgcgttagcccggcgtccttgatggactccttgaccacgtctcccagctggcgggatgtgacgttcgctatctttgccaaatcaaacctcctgagctttatctgaaaccttagttgtttcatatgagacatgatagatgaaaagttgcccacatcaaaacacggcgtgtctcatatgagacaaaaaatgtggaaagagacataccatgaatacatggcaacaggaaagaaaatacccactatcgaatcaaaggcgctatcgatagcaatcaagagggcaatgacaacacgagagctgaaagtcaaagcactcgcgcaaatttccggcgtgccctacggaacactgcgacgcatcttggagctaaacacagtcgccgactacgaacaactgcaacggatcgcaaaagcactgcgcacaccactgccgcaaatcatcgaagacgccgaccagatcagcaaagatccagacgtcatcaccgaattcgaaacctcccaggaagaaattgacatcgacgcatgggccaacagaatcaatgcagaagactcgataatggaagggacacaatcatgaagcagcgcaaactccagctcaacaacaactgggccaaacgcaaagcagcccaactcaacacatggatgcaaggaagcgtcaaggcacgctcagccgtatgcacggcaaccgcaattgcatgtctagtcggcatggcggcagcgacgatcggatacgtcggaggcaccaagtcagcggccacgaaggaagtggcgcagagcatggcggcggacaacaaggattacgagaagctcatcaagaaatacaacagcctcgtggatgagtacaacggaatcgccgacgaatacaacgacgccaaggacgcgatcgccgaggccgataccgtgaagtccggcatcaaggatctcaacgcacagcacgacgacctgcaaaagaaggtggacgcgaagaaggccgagctgcagtccctgaccggccaagtggaccaggcgaagaagaattccatttccgacggcgtgtggcaggtcggcaaggacatcgacgccggcacatatcgcgccacaagccaggtaggaagcgactgctattgggagatctcgaccgacaacggcgacaacatcgtccagaacgatttccctggcggcggctatccggaagtcacggtaggcaatggccagcagctcaaaatcagctcctgcggaaccatgaccaagcagtaaatgaaccaatacagtcacagcccggcagtatgtgccgggctttttctttgcctacccccccgcctctagctctgccagacgcgcgcggagccgggcgatttccttatccttgtcgctctcagccgagactgtgacgtcccgctgcggcgtggtgatgctggcggccaccttgtcggcgagcgcgcgctgtctgtctttgctgagtcgctggtagtgcatggccatggtggccgtgctgtggccggcggcggccatgagttcgcggacggtggctccgttctgtgcgagcatggtgagtgcggtggagcgcaggtcgtggaatcggaggtcttcgcgtccggcctgtcgtcgcgctttgatgtaggcttcgcgcatggcgtccgtgctgatcggcctgtcatggtccagcgggctggggaatatccatgcgtccggctggtcggccacatattcggcgaggtgcacgcggatttcggggatgacggcttcggggattggttcggtgcgtttgcttctggcggtcttcggcggcccggcgatgacgcgggcgcgggtgagtctggtgcggcggatgtggatgagacggttgtcgaggtcgatgtcgccgcgttggagcgcgcagacctcgccgatgcgcaggcctccgcaggagatggcgagggtgatggcgagctggaatttccgtggcatcgcgtcgtggatccgccggagctgccgtggcgtggcggcgggcgtctcctccctgggtgcgggcttgcgtacctgcatggcgaatggggatttggcgatgacggcgatgccgtcctggtccggggtcgcggcggcgtcgaggatctggcggagcttggacagcagctctcggccgacgtatgggtggtccttcggcagtgtggccgcatagcgctcgatgtcggccgaggtgatcttgccgatcggcatgccgccgaacgcgtcgatgagccgtttgaccgtgcatctgatgccgtagatggtgttggcgtgcagtccttcgccctcacgcgtctccagccatttcgcggcatactcgccgaatgtcagggcggtgtccttggccttgcgcttgacgatgcgctccggctcccacacgtcagcctcgatgcgccgtctcgccctggtcagccatgccgcggcctcgtccctgccgtcctgcgtgcaggggaaggtggccgtctggcggttcggcagatccggccattccgaaaaggcggccacgggcgtaagataggaggcctctatccacttcggattggccttgcttggcttgacgacgatcttgccgaacttcctgaccatgacacatcccccggttgaggtggtggagctttaccactcgaattaccactccaattgtggcgtatgagtctatttttggtcaaaaattcccgcgtttcaaaatggcgtatcgatgatatgtacgctggaaacggcttgattccaacgtttttgtggagcgcgcgtcggcgagcgctatttgttccagttttccagcagacataccgggtggtcatgatgcgcatgctgcttgaggggcggacctacgacaaacttcccgtgagccgtttcctctacccgatcaccacgcgcaaatggttgtcgatggcgaaggtgatgctgctcgagaacgtgttcctgttcctgtggacgttcaccatcatcggcgcgttcatcaaaccgtattcctaccgtatggtgccctacatcgtcgccgaaaatccgaatatcggggcacgggaggccatcagcctgtccaggcgcatgatgaagggtcacaagtgggagtgtttcgtggccgacctgtcgttccttggctggtggctgctcaatctgttcacgctcggcttgagcggcatcttctattccaacggctataacgcggcgtttttcgtcgaatattacgtgcatgtgcgcagattgtccaaggattcgggattggagggaagcgagctgctcagcgacgaatacctgtacagcaaggcctccgctgagacattgcatgccgcttatggtgatgttgccgaaacggtggagcagttgtccagcaatcttgttccggtggacaagccgaacggtttcgtcgggttcctgtccgaatggttgggcgtgcgtatcctgcatgcgcggtcggtgaccaagtatgaggagtatcgcgagcaactgcatcagatcgataccggcagggagattctggacggcgctatctatcctggtcgtctggctccggcgccgatggcgttccggttccgcgaatcccgcaccgtcagctccgatcgcagctattcgttggtcaatctggtcatgatgttcttcatcttctgtttcgtgggatgggtatgggaggtgagcctcgccttcatttccgaaggaacgttcgtgaatcgtggcacgctgcatgggccatggctgccgatctatggcaccggcggagtgattatccttattctgctgaagaagttgaggaagaagcccttgttcgagttcctggccgccatggtcttgtgtggcgggttggagtacttctcgtcctggtatctggagaagacccacggaggacaacgctggtgggattacaccggttattttctcaatctcaatggtcgtatctgtgccgagggtctgctgacgtttggtttgggcggtttggcgatcgtgtatctgctggctcctgcattggacaacttgctgagtcgtatcgatacaagaaagctcaccgttgtggccgtcgtgcttctggcgttctactgtgtggaccaggcgtattcggcgcagcatccgaacattggtgccggcatcaccgattacaaggggtcggccacatcgcaagtgtcgtagcccctatccgatgtgatgcataaagggattttgcccgtcagcgtgcgcaacgcaggttggcggggcaaatcgtttttggacacatgctatacgacacgtgtggccggtggaaacttactttcggcgcagcatctcacgcacggtttccatgatcttgctgtatttggtggagtccgtggaacgcatgcgtgggaaggagcggatcatacgacgttgctgccaattcaacgcggaagagacaagctgacgcatattggcaacacgttcctgcgacgattccgacaaatcatgcatcttttcccggaattcctctttgccccactgccaggagtctccggccttctccgcacgctcctgcaccgcttcgctgaatttggcgagacgctcggacaggccgacgatgcccaccacggtgacgatggtgtcgatgataacgacgatggcggcgaccgcgcatatcatgtgcacggcaagcagcggaatcatggcggtgagccgttcgacctgcggctggaccacatcgatgatcaatactccgccgaatccgaatacgattgcgccgagcagacagatgcggccttggatgttgaatcggtaatggctgtaatcccaccatctggcgtggaacagcttttccatgccccaagaggtgatgtattcgagtatgctcgcgccgaatgaggagataaggaaaatctcgatgggattcgtgaagtcatgcaacagcacgatcgcaagcaccgcgccgcatccgtaaattgggcacaacggcccgttgaggaaaccacggttgacccatcgacgttccgaaacggacacgagaaccgactcgtacacctatccgataaaggcgtacaacaggaaccaaaggaacaaatattcgagtgtgagcgccacagccatcagctcctgtccgtcggttgtccggatgcgggtttgtcgaaacgatcgaaagagagcgtttccttcgtggcgctgattttgtcggccgcggtgacaaggtatccttcgatgtacttcggcggatagggagtcaatgggaacatgtgatgttcgatgctgtcccgttcgatctggttgagtttgaaatcccgtatggcgttgcacatggccgtttcaccatgtgtgaatccgtgtagccgatgggtgccgttgtcccagtcatgccaatcgtaaaggaagtaatcatggagcaaagcggcgcgaatcaacgaatgtagatcaaccctattccacaggtgcagtctgtctgccagccagacggacagacaagccacacgaatggaatgggcgaatgtggtgaccacgccatgctggtagcagaccctttcgatggccatgtggtcatgttccagaatctcccggccgtgcgcgtagaccagccgtcgtatctgtgtgcgcgtcaacagcaccgctttttgctccttgcttgatagggattacttgagcagggattcgggcgacttgtatgcggaaccgtcagacacggagttggcgaaagcgcgtagctgctcgatggtggtcttggcggaaacgatctgttcgcgcacgcgcagcggggaggtgcctcccttgccgttgcgggcggagacggagccttcggtggacagcacttcacgcacctgcggggccttgtccgccggcaggaagtccttgaacacgttgatgaagtcctcgtcggtcaaatcccacagctcctggccacggtcttcggcaatcttgacgcaggcgccggaaagctcgtgcgcgtgacggaacggcacaccgttcttgacgagccattcggcgatgtcggtggcaagggcgaaaccggtcggggcttcggcttcgaggcgttccttgtcgaagaccatggtggcgaccatgccggtgaacgccggcagcagcacttcaagcgtgtccacttggtcgaatacggcttccttgtcttcctgcaggtcgcgcgcataggctgtcggcaggcctttcaaggtggcgagcaggccagtcaggtcgccgatgagtcgtccggacttgccgcgagtgagttcggcgatgtccggattcttcttctgcggcatgatggacgagccggtggagtaggcgtcatcaagacgcacgaacgcgaattcctgggtgttccagatgatgatctcttcggacaggcggctcagatcgacaccggtcatggcggcgatgaaggcgaattcggcgaccagatcacggctggcggtgccgtcgatggagttggcggtcaccttggagaagcccagctcacgggccacagccaccggttcgagtccaagggtgttgccggcgagggcaccggagccgtacgggctggcgtcgatgcgcttatcccaatcggcgagacgttccacgtcacgcagcagcggccacacgtgggtcatgagctggtgggcaagcagaaccggttgggcgtgctgcatatgcgtacgtcccggcatgacggtgcgaccggctttttcggactgctcgatcagtgttgcggcgagaccgagcagcattttggcgatgatgcggctgtggcggcgcagccacatgcggatgagcgcggcgatctgatcgttgcgggaacggccggcgcggagcttgccgccgagttcgtcaccagcgatctggagtagaccgcgttcgagtgcagtggcctcgtcctcgtcatcctcgatcggagcgaacgctccggaatccacgcggcgctgcagctcgtcaagggcgtcttccatgcgctgcagctcatcggcggtcagcagtccggcgcggcccaatgcacgggcatgggcacgcgaaccggcgatatcgtcatcggcgagtcgccagtcgaattgggtggacttgctcagccgtgcgagttccggcgacggaccagacttgaaacggccgccccacagggcaagatgctcaccattagtagtgctctcggtcattgtttttccaaatctccttgcagatatgactgagggagagcttaccagtcaggatggtcccgacggtacgctctcccccattatcaagacgattcacaacgtgaatccggatgatgcttactcgacgctgttctccggaacctcgatgccgttgccgaacttgacgtcgcgggctgcggccacgcggctcggcagaccatagatgtcgatgaagccgttggaggacttctggtcgaagctgtcgccggaatcgtaggtggccaggttgtagtcgtacagcgagctgtcggagcgacggccggtcacgacggcgcggccaccgtgcagaaccatgcgaatctcgccggagacgtacttctgggtgtcttcgatgaaggcgttcagggactgagtggccggggagaaccactgcgcatcgtagaccagttccgcccaacgcttgtcgatgtcgcgcttgatgcggtgctgctcgcgttcgaggcagcagttctcgagctcctggtgggctgtgatcagtgccacggcacccggagcctcgtacagctcgcgggacttgatgccgaccagacgatcctcaatcaaatcgatacggccgatgccctgcgcgcctgcacgacggttcatctcttcgatggcctgcagcggagtgacgtcatgaccgtcgatcttaaccgggacgccctgcttgaattcgatgacgacctcatcctcgaccggtgggaacgccggatcgtcggtgtaggaatagcaatccttggtcggaccgttccacggatcctcgaggaaaccggtctcgatggcacggccccacacgttctggtcgatggagaacgggctcttctcggtctgcacgatcggcagcttgtgttccttggcgaaggcgatctcgacgtcgcgggtcagggacaggtcgcgaatcgggctgatggccttcagcgtcgggtcgatggaggcgatggagacctcgaaacgaacctggtcgttgcccttgccggtgcagccgtgggaaatggtgtcagcgccgaactggtgggcggcacggacgagatgcttggaaatcagcggacgggagatggcggagaccagcgggtacacgccttcgtacatggcgttggccttcagggccttcatgcagtattcgttggcgaattcatcacgggcatcgaccacgtaggcttcgaccgcaccgcatgccagcgcgcgctgcttgatggtttcgaggctttcgccgccctggccgacgtcgagggacacggccacaacatccttgccggtgcgttccttcagatatgaaatggcgacggaggtgtcaagaccaccggagtacgccaggacgagacgattctgatcgctcatggtttccctttctaacatccaacgttattcatcagtatatgcacagctctgtatatttatgcatatttggtgcgtcgtgtccactatatggctattcacgctttggaagcgacatcaagcagccattgcgcacgccgtttggcgacatcatcctcggagcagataaccatgaccgtgtcatctccggcgatggtgccaagcacgccttcgatgggctgcttatcgatgacgctggccacatattgcgcggcgccggatggcgtgtgcacgaccacgagattacgtgccgcggccacggatgtgaccagtccggacagtacccggctaatctgctgctcggttttggcgtccgggttagaagccggatgttcatcaatgttctgtttgccgacggcgtaggccacggttccgtcggcaagacgggtcttcgtggcgtgaatctcatcgagatcacggctcagcgtggcctgcgtcacctcgatgccctggtcggcgagaatctgcgacagttgcgattgcgaggtgacgatgcgcgtcagcagcgcctgctcaatggcgctcagtcgagcggttcgtgtggcaggacgctgcaacgcgggagtgtggtcagtcatcagaccagcaggctttcatcgccacgggccttgccggccaaccaggtcagcaacgccttctgggcgtgcagacggttgcctgcctcatcccaaaccacggactgaggaccatcgataacctcggcggtgacctccttgccgcgatatgcaggcaggcagtgctggaagatggcgtcgtccttggccttggccatgagttcggcgttcacctggtaatcccagaacggcttggaacggacagcgtattccgcttcctcgcccatggagacccacgtgtcggtgaagacgcaatcggctccggcaacagcctcattcggatcagtagtgacgaggatggagccgccggtctcagaggcaatcgcttcggcatcggcaacgatctgcggatccggcaggtatccgtacggtcctgccacacgcacgttcatgcccgccacagcgccgccgagcaggtaggagttggacatgttgttggccgcgtcgccaagataggcgatggtctggttcttgaggttgtctacaccgccgcgatgttccgcgatggtctggaagtcagcaagaatctggcacggatggaattcgtcggtcagtgcgttcaccaccggatgggtggagtacttggccatttcctcaacacggtcctgaccaaaggtgcgccacaccacgccgtaggccatacggtcaagcacgcgagccgtgtcggccaccggttcgccacggcccagctgggagccggacttgtcaatgaccagcggatagccaccgagttcggccacgccaatggagaagctggagcgggtacgggtactgggcttgtcgaaaatcacggcgatgccctgcgggccagcgaacggctggtgatagaaacggttcttgtggaacttgatggccagttccagcacctgcttctgttcttcgtggttcagatcgtcatcgcgcagcatatggcgcagttcaggggttgccattggtatagaggctcctttcaaattcttcgggttcgtccgagatcagtcgttaggcaggtcggacggaatcttggcgaggatggacaccgcttgatcgacgtcctgagcagtgatgaccagcggcggggcgagacgcaacgcattcggagccaccgcattgacgatgagaccgtgttccaaagcccagttcatggccgcatgcgagcaggggtgggcaagttcgatggcgtcgagcaggccacggccacgcacggagacgaatagcggattaccgcaggaggcgataccgtcgcgcagctgcttgccgcgttcttcggcgttgtccacgaggttgtcctcttcgatgactcccagcgttgccaatgccgccgaagcgcccaatggattgcctgcgaaagtggagccgtgggaacccggggtgaacagcgcggacagttcggcgccgaaggaaatcatgccgcccatcgggaaaccaccgccaacgcccttggcgaaagtgacgatgtccggggtcacaccgccggaaagatcctcacgctggaaggcgaaccatgctccggtgcgtccgatgccggtctgcacttcgtcgatgatgaggagcgccttatgttcgtcgcacagtttgcgggcggccttcacatagtccgctccgagcggcatcacaccggcctcgccctggataagctccatgatgacggccgcgaccggccctttgccgtacttgccctgaccggtttcggcgaaagcgtcgtgcaaggcttcgacgttgccggcctccacaaattcgatgttcggtaccagcggctcgaatttctcacggatggcgggcttccacgttgcggacagcgcgcccatggtacggccgtggaaaccgtgggtcatggagatgatgcgtgccggtttgccgccgatctcaggcgacgcgcccggcagggtgcgcccgtagagcttggcgagcttcagcgccgcctcgttaccttccgcgccggaattgccgaagtagacgcgggaaccttccggagcgcccgcgagcttgacgagtttggcggcgagcttgatctgcggttcggtggcgaagtagttgctcacatgcgcggccttggcggcctgctcgctgacggccttcacccacttcggatgggcgtatccgagtgcgttgacggcgatgcctgcaaggaaatcgagatattcattgccgtcgacatcccagatgtgggcgccctcaccgtggtccatcacgcgcaggggcgtgccaaacacgttcatatgcacctgggagtactctcccagccacttggcatcttcagtgccgagtgtttccagttgttcagttgccataggaactcctcatttcaataccgtcctcgggcacgaccatggtgccgatgccgtcggtggtgaagatctcgttcaggatggaatgcggtttgcgaccgtcgatgatatgggcccgcggaacacctccgtcgatggcgcgcacgcaggcttccatcttcggacgcatgccgctttccaggtcggggagcatatcgcgcagattctccacgccgatgcggccaatcagggagtcacggtccggccaatcggcatacagaccatcgacgtcggtcaacacgaccagcttgctggctccaagggccgcggcaagggcggccgcggcggagtcggcgttcacgttgagcacttcggtggcatcgtcttcattcggcgccacggaggagaccaccggaatacgtccggcgttgattagatcctccacggcggacgcgtcgacgcttaccacgtcgccgaccaagccgatatcggtgggcttgccgtcaatgaccggtttgcgctgcatggccgagaacagggcgccgtcctcgccggacagtccgaccgcgaatggaccgtgcgcgttgatcaggccaacgagttcacgggacaccttgcctgtcagcaccatgcggaccacatccatggcttccggagtggtgacacgcaatccgcccttgaattcggacttgatacccagggccttaagcatttgggatatctgcggaccgccaccgtgcaccacgaccgggtgcagtcccacctgacgcaggaacaccatgtcttcggcgaagcaggctttcagatgatcgtcgatcatcgcattgccgccatatttgataacgatgcgttgtccggcgaattcctccagccacggcaacgcttcgataagcacttccgccttctggtcggcgcgcaggtcggtgtgcacgtcgaagtggaatccaggtcctttgagttctttggccattcctattcgatcagctttcgtagtcagcgttgatgtgtacgtattcgtgggtcagatcgtcggtccagacggtcgcttccgcttctccggcgttcaggtcgatgtcgatgtgcacctcgcgtggggtcatgtccacttcggagcggtcgcgtccggctccgccgttttcgcagatgcgtacgccgttgacgtccaccgtgaccttttcggaatcgtatggtgcgacgtcggacggcacggtgccaagggagctgacgatacggccccagttcggatcgttgccggagatggcgcatttgagcagattggacgctgcgaccgcgcggccgcatgccagagcagcttcttcggtggtcgcgccggtaactttgacacggatgtcatggcttgcgccttcgccgtcgccgatgatctggcgggcgagcgaggcggtggccttggccacgagctcgttgaactcgtccggttccggttcgatgccggacgcgccggaagccagcagcagcacggtgtcgttggtggacatgcagccgtccacgtcaatgcggttgaacgacatttcgactccggcgttcaaggcggcttgaagctgtccggcggtcacgacggcatcggtggtgatgacgcacagcatggtggccagctgcggggcgatcatgccggaacccttgaccatgccaccgatacggaagccgttggaaccttccagctcgacggttttcggcttggtgtcggtggtcatgatggcgtgcgacgcatcggctccggcttcggcggtatcggcaagggtttcaaatgccttgtccgcgccggacagcacgttgtcgagcggcagcaattcgccgatgagaccagtggaacatacggccacgtcttcggctttggcgccgatgaggccggcgaccttttcagcggtggccttggactgctcgtatcctggcttgccggtgcatgcgttggcgccgccggagttcagaatcacggccttcacatggccgtcggatacgatgttcctcgaccactgcacaggagccgcgcagaaacggttcgaggtgaacacgccggcagcggcgtcaagcggtccattgttgaccacgagagccagatccttcttgccttcgaccgcggaaatgccagctgccacgccagctgcggaaaaaccttgtgcgaacgttacgctcacggtgccactccaatcttcgtcaatcctgcatcctcaggaagtcccaatgccacattcagcgactgcacggcctgcccggcggttcctcggttgaggttgtcgatggccgcgaatgccagcaggcggccggcatgatggtcgacgaccacttgaatgtgggccgcgttagaaccgatgatgttggcggtggccggcatcacgccttcaggcagcaccaccatgaaatcctggccttcgtatgcgtccagccagacctggcggatctcggcatccgtcatgccaagcgctttgtcggtgagtttggcggaaacggtggcgagaatgccacgcgccatcggcgcgagaatcggcgtgaaggcgagggtgtaatcgtccgcctccgcagcactcttgccggccgcgtgcgcgaagttctgcaggatctccggaatgtggcggtgcgtaccgcctaccgaatacggcagtgcggagccgaacgcctcagccgcaagcagattggtgcgcttgaggttcttgccggcgccggaataaccgaccaccaaatcagccacgatgtctttcggttcgacaagaccctgcgcaatgcccggttgcaaagccagcgtggtcgcagtgacgttgcagcccggtcccgcaatgcgcttggtgccgggaagcgcttcacgctgacgactgtaggagccgtctgtctcgatgccggtgatgagttccggcatgccgtaggtccaatgctggtagaagtcaccgccgtagaacgcgtcccatgcgctcttctcctcaaggcggtgatcggcacccagatccaccaccactgcgttcggatcaagctgggaagccagcgctccagaagcgccgtgcggcaatgccaggatgattacgtcatggccgttgagcacttccggcgtggtgtcctcgaccacgaggtccgccaactgcggaatgtgcggcatatgcttgccaagcttgtcccccaccgaagaatgtccggcgacgcaggtcacttcgaaattcgggtgtgccgcgagtatgcgcaacgcctcaccacccgcgtatccagtcgcgccagccacggctaccgtgtatttggccatgtcacgtctcttttccttgactcgttgaaacacattcagcatacactttatgcactacattgcataattatgcagttcaatcgtgtcggatagtgatcaccgcccataacgggaccgttcagacgaacataaaaagattggtttcaggcggaaatcgagctggaatcaccactttgtccactgccaccgaacatgtactgcatcatctggttatacaaatcggctgtggaaatgccgtgaaccgtcatccaaatcaccgcaatggtgtacagcacgttgataatcagcgctgccacgccaagcgcgtagcctttcatatgcagttttttggtacgccacatggcgatggcgcccatcaccgcagggatgaccggtaccggcaggaatagtgcgaacacgaacgagatgatcgcatagctatcccaatggccgtacagggggttctggctgggatcattcgggttgatgggatatatgccgggctgttggtatggattcggcccatactggcttggcccgtattgatttggtccatactgatagccattgggctggcctgattgctgccgtcccgatgcatcatatggattcgccggatacccgttctgcatatacggattcgtctgcggccgctgcgccgtttgttgtgcatcgtccgccggcttgggctgttcgggagccccatacatgtatggattgtagttcgccggatactggttggacatcgcgccatattcaggctggttgtactgtccgaattccggctgtgccgactggtccgacgacgaagacgacgaagacgacgaaaccggagcagccccggccgcctcctgcccttcgtcggggttgatcggctggttctgctccggttcgttcatgtcgtcctctttatctttttggttacttcgatggacttgacgtgtcaggcacgcagttgcgcgcccagcttcgcggccgcatccacgatgcgcttgcgaatggcttcgctgtcctcggaggtcagcgtcttgtcctcagcgcggaacgtgacggcgtatgcaagggacttcaatccctcacccagctgatcaccggtgtacacgtcgaacaggtcgatgctctccaagctgttgccggcggcttcgacgatggtcttctcgagttcggcggcggtgacgtccgtcgacacggtgaaggccagatcctgcttgaccggcgggaaggtggaaatcggcttggcctgcaccggcttgccgctcaaggtggcaaacagcgcggtcaggttcagttcgaacgcggcggaatgggccgggaagcccaacgcctcgttgacatgcgggtgaagctcgccgaccatgccgacgaacgtgtcacctgccatcacacgtgccgcacggcccggatgccactgcgcgggtacgtcctcagccttcggctggtccaacgtgagctttgcgccgatgcggtcggaaatacgctgcacggcttcaactgcgtcggaccagtccacggcacggcgatcgcccatccagccggagtcgacggcgttgccggtcagaatgccggcgacgtgcatcggctggtccggcaggcctgcgtcaagcgcggccaactgctcgtcggtcggcttgacggcacccggcaatgccggaatggccggagcgttcggatcccacaggtagacgtgtccgatttcgtacagcgacacgttttccacgccacggcgcaggttacgctgcacggtctgcgcgagggtcgggatgatgtcgcgacgcaggaacgggcgatcgccggccagtgggttggcaatttcgacgctgaccttcttggtggcgtcggcgtcaagtgcgaagttcttgtagtcttcgtcgcccacgaacggatagctcagggtctccaccatgccgtattcggcgagttcgtcggccacctggcgcttgcgcagctgttcggcggtcagtccgaccttgccttcgaccggtgccggcggcacggtgaccggaatctcatcgtagccgaccagacgggccacttcctccaccagatcgcacggttcgttgaggtccggacgccagctcggcggagtcacggagaactcaccgttgccaccgccggccacagtgcagccgatatcggtgagaatgtcgctgatggtgttcacgtcagtgtccagtcccgccacgcgggccacttcggacgccttgaacagaatcggacgacgattgcagacggtgttgtaatcagtcgggtgctcgctcggctcgccgttgccgtacttgaccagaagctcggcggccatctgggcggcagcgggctgcagctgatcatccacgccacgctcgaaacgacgggacgcttcggacggaatcttgtgacgacgtgcggaacgcgcgatcgacacctggtcgaaatgagcggattccagcaggatgttcttagtttcagcagtgacctcgccatacaggccgcccatcacgccggcgatgccaagcacacgagagccacgctcgccgttcggcgagtcggtgatcagcaggtcttcgacgctcaggtcatgatccttgccgtccaatgtggtgagcttctcaccttcattggcgcggcgcacgacgatcggtccttcaatcttgtccagatcgtaggcgtgcatcggctggccaagatcaagcatcacgtaattggtgacgtccaccgccaaagagatggagcgcatgcccgcgcggattaggcggcggcgcatccagttcggcgtgtggcttgccgggtcgaaaccacgcacggcgcgcgcgtagtagcgatcgcagccgaccacaccgtgaatcggattcttgtcgtcgacgatcacttcgatgtcgctcttgacaccttccggcagaccctgagtgacgggcgccttcttgccgagggcggttgccggatcagtgtagacggcgccagtggaatggtggtattcgcgggccacgccacggtaggagaacgcgtagccgcgatccggggtgatgttgatttccagcagcggctggtccaggtgcagcagatgcatggcgtcatcgcccggctggagcttttcgtattcctccggggtgaagccgtacttgcgtagcaggatgatgccgtcgtggttatcacccagaccaagctcacgctcggaggcgcacatgccgttggagatgtggccgtaggtcttgcgcggttcgatcttgaaatcgcctggcagcacggcgcccggcagggtcacgacaaccttctcgccggctgccatgttcggagctccgcagatgatgccgcgtggcaccttgttgccgttttcatcggtctcgttgtattcgtcgccgacgtccacatgacaccagttgatgatcttgccgttcttctgcggttccggagtggcgtcgaccacatagccgacgacaatcgggccggtgacctgggaggtgtggatctcttcctcttcgaggccgaccttcaccagatccttggcaagctgttcgtacgtaaggccttccggaacctcgacatggtccttgagccaatcaatgtcaaccattggcatgggtcaatcactcccccatcacaaactgttcgctgaatcgcacgtcgccttccaccaggtcgtgcatgtcgttgatgtcgtggcgcagcagcagggtacgttccacgccgacgccgaaggcgaagccggtgtagacctcaggatcgaggcccgcagacttcagcacgttcgggttgaccatgccgcagccgccccattcaagccaaccggcgccgcccttcttatcggggaaccacaggtcgagctcggcgctcggctcggtgaacgggaagtagctcggacgcagacgggttttggcttccgggccgaacatggccacggcaagcttgtcgagcacgcccttcaaatcggccatggtcagatgcttgtccacggcgagggcctccacctgatggaacaccggggtgtgggtggcgtcaagttcgtcggtacggaacacacggcccgggcaggcgatgtacagcggcacgccacgggtgatgagtccacggacctgatcggacgaagtctgggtgcgcagcaccatgttggagccgacgaagcccgcggcgtccttggcctgattgcccttgacgtagaaggtgtcctgcatctggcgggccggatggtccggaccgaagttcagcgcgtcgaagtcataccattcggtttccacttccggaccgtcggaaatctgccagcccatggagataaagaagtcctcgacatcctccatcagcttcggcagcggatggcgggcgccaagcggcttgcggttgaccggcaaggtcatatccacggtttcggcagcaagctcgcgggcctcttcttcggccttgacttgcttttccttggtgccgaacgcacgaccgaagtcggcgcgaagcttgcccatgagcttaccggcgtctttcttctggtccttcggcaacgcgccgatggccttgctggcctgcgtcatcgcggattccgctccggcgtactgcgtcttgatggctttcaattcctccattgtggaggcgttttcgattttcgcgatgccctcggcaaccgcatcggttaccgcttgggcgtcgaataccgcaccctctgccacgagatacctttcttatcaaccgtttgttttacgcataaaacgcgcaattccaacgtttttacgacttcacattctttcaacatgactcgacatagccaagctcagcagcatcaccgccgcgctggtgccgagattgagcgattccgccttgccgtagatgggaatcgacacgattctgtcgacgcgttccaacacatcctgggtcagcccgcgcgcctcgttgccgaacagcaccgtcttggcttgcgcaagtgattgcggcacggcaagcacgtccgtaagcggttccggcggccgtgcgtcggtaccatacacgtcggcggcgtacacggcgagtccacgttccgcacaccaatcgaaatactcgtccgttcccatggagacgaccggcagatggaacagcgagccggcagtggaacgaatcaccttcgggttgaagatgtccacgcagtcgtccaccagcaccacgcccgcgcaaccggccgcatccgcggaacgaatcacggtgccggcgttgcccggatcgcgcacctgccagaacgcggcgaccatcgtgcgttcgtcggaatcgccatcaatgacggcggaatcgaggaaagcgcgcatgtcggcgacggcgagcactccctgcgcgtcggagctcatgtgctgcatgacggcatgcgtcaccttatgcacgtaagcaccggcctgcatggccttgccggccatctgcgccacggtaggcgtgatgaaagccgcgtccggttcggcggagacgacctccacatacagatcctcgacgatgtcgggatgccaggagagcagttcacgtaccgactgcggtccttccaccatgaacctgccggaccgcttgcggcctttcctgtcggcaagttcggagaccctgcggacgcgttcggcccttgggtttgcaatgacttcggatttcataggcatacgcgttagcctaacaccttcgaagcggttggcgacgcggccatgtcatgtttcgaggcgtctagaaaacatccagccacatcccagcgcgaacaaagcgtctttctgttgtatgccagatacaacttttaccatcagcataaacgccgatcgcgagcggcgcggaaccatcaatcgctcatatctatcgaaacacataaggaaacagccatgttcgtcgtcaaaaacgcatggaaaagcgtcacccgcaacaaggtgctcatcatcgtcatcgtgaccatcatcgccgctgccgccacaatcggcctatccatccggcaggcggccgccaccgcaagaagcagcggattagataacaccaccgtcaccgcgcagatcagccttgatcgcggcaaactcatttccgaatcgcgcgagcagtccaagtcggattccgattcgtccgatgcttccgccaaacctgacttcgacgccatgcgttccgctttggccgacaagcagttttcgcttgccgactatcagaagtacgcgaaggctccatccgcggtgaaatccacatattatatggagaccacggggttggcggcgactgacgatttccagccggtcaccgattcgtccggttcggattcatccagctcgtccggctcgtccaatatgaaggattcgtctgataccgccggtacggataacggcacccgtcaggatgaacagtccggtggccccgacggacaaatgggcgacgtcgcgggcagcaaagacggcgcgggcatggtcagcggcgatttctccctaatcggcttctccagcgacgaggccgtcgccaacgcctccaatggcagcttcacgatggtgaagggcaaggtgttcggctatgacgcgagcagtgatggcgatgccatcatctccaaatcgctcgccgaccgttcctgacaatccaatcgcacgttttttctggaaaggacctcccatgacaacgaattccgcggataccgccgatacggcaatcgcaaaagaagccgtcgaagccaacggcgcacaatcgcagcagaccgacccgcctacgctgcagctggataacgtcagttatgcctacaccaaaggcggcaaacgcgtgctgaaaaacatcagccacgatttccaagccggcaaagtgcatgccatcaccggaccgtccggagcgggcaaaaccacgctgctatcactgatctcgggactggcgaatcccacggaagggatggtgctggtcgacggcaccgacctgtcggaacgagaccgataccgttttcgcagccatgacagcggcgtgatcttccaaagcttcaacctgctgccgaaccttacggtggcggagaacatcatcctgtcgatggacgcgtccggcaaatcgttcgacaagccgaagaaagcaatcgtcgaagaattgctcaaacaggtgcatctgccgaaggaatacgcgaacgagcggattctgcacctgtccggcggcgaacagcagcgtgtggcgatcgcccgcgcgttaagccatggtccttccatcatcgtcgcggacgagccgaccggcaatctcgatccggccacgcaggacgacatcatgggtattttccgaacgttggcgcatgatgggcatcgttgcgtcatcattgtgacgcacagtccggaagtggcgaagacgtccgacgaggtgttcgagctggctcccatcaggcgtcgcagataagcgtcggcagcttctcgaaaagaaatacggcatgcgtccccatgcaacggacacgcatgccgtattttttcctgtttcggttggacggtggcgttatgattgggcgcgtcgaagtacagggggtgccgaatacggctgagacgggcgaccgcccggacccttgacctgatcaaggtaatgcttgcgtaggaacagtaccggcaaaacgcgtcgcgtcccgtaaagacgatctccgttgtatttcggcacccaatggaagtcgagaagggacaccatggccaacgaaaagccatcgacgcagacgcagacgcacggcgatgccgcaaccagaaagaaaaccgaaacgagcgtggcggaagccggttcgtcagccgaaaagaaggtcacgccgaagaacgccctgctgggattgcagcatgtgctcgtatcaaacgtgtggcttgatccggtgttcgtggcgggcgccatcggtctgccgttggcattgtcgtcgaacatggtgaacgccattttcatcgtctccggcctggtcacgcttatccaggccacgaaactggtgcgcctgcccatcgttcagggtccttccgcggcgttcgacgcgctgatgatcgccgccggcaccgccggatcacttgccgcggccggcacgtccatcttcatcagctcgctgattttcctggtgctgtgcctgacgcgtgtgatcgagaagctgcggttcctgttcgccccgatcgtatcgggcgtgatcatcttcctcgtcggcgtctccctgtcgggattcacattgagcgagttccttggcggcgcgccgggagacaagggcttcgccgatccgaagacgctggccgtctccatcatcacctgcgtgctggtggtggtgctttcccagttcggcaagggcatggtgaaggctctgtcgtatctgatctcactggtcgtgggcaccgcgctgtctctggcgttcggcatggccgacttctccgcggtggcctccaagccgtggctcggcctgcccaagttcatgccgtatggcggtttcgatttcaacgcggcgattttcgtaccgttcttcatcgcctatctggtggccatcatggaagccctcggcgtgtatcaggcggccacggagatccaaggcacgaagctccaggaccgccaggtgcgttacggtcttgccggagaggccgccggttcggcgatctcctcgctgatcggcggtttcaccaccaccgcgtatccgcagaacgtggcgctgctcaaagtcaccgacgaaggcaagacccgcacccgcgtgccggtgatcattgccggcgtggtgttcgtggtgcttggtttcattccgaaggcgggcgcagcgctgtcgctcatcccatcccccgtgatcggcggcatcttcctgccggccgccgcaagcctcatcagcaccggcttcaacacgctgcgcaaggtggaaagcgacgaccgcacccaagtggtgatcggcctttccctgctgcttggcatcgccctgccgaacgcgttgagcggtcttgaagaaggagcgcacgtgttcttctcgaattcgattctggtcggcgcgttcagcgtcgtgattctcaaggccctcatcatcgacctgccgaactttatcgcacgacacgcagacgagcggacgaaacaagcggaataatcgaaagcatccgaataatccgacaaccatacgacggaaaggacatggcatgagcatggggcaatcgcaggaatccacgaacatcgacgagacgaaggaaaccatcaaacgggaggtgctcgacttcatcgcacaatacggctgcggcaaggcgcccgatgaggcgttcgacacgctggcgaagcatatcttcgcctttcaattcgagcgcaacctcccataccgcgcctactgcatgtccaaacgcgtgacgccgcagacgctcgccaactggatgcagattccccccatgccggtggacggcttcaaaatgctgacgctcacctccgtgcccgaacaggattgcgaagcggtgttcaccaccagcggtaccacgcatcccggtcaacgcgggcgcaacttccaccccgacctgcaggtgtgggacgagtcgatgatcgtgccgttcaggcatttcatcatgcccgaccgcgagcgcatccgcatcgcggtcctctcccccgcatgggacatgaacgagcattcgtcgctgtcccgatatctgacccgcgccgtggagcagtgcggcgccgaaggcagcggcttcttcttccatgaggatggccttgatttcacgggcgtcgagcgcttcctcgacgaggccgcggccgacggcgaaccggtgatgcttatgggcgcctcctccgcctacctgtatctgctggattatctggacaagcagggcaagacctacgctctggccgccgattcccgcgtgttcgatacgggcggtttcaaaagcacgcgcaccgacatgacggtcgacgacctgtatgcggcgttcgaacgagtgttcggcgtgaagcgctcgcattgcgtgaacatgtatggcatgacggagttgagttcgcagatctacgatcagaacatcctgtcctattacacggatggttcgtcgaattatctcaaagccacgccgtcgtgggtgcgttcggtgttcctcgatccggcttcgcttacgccggtcgccgatggcgagcagggtgtgatcgcgcattatgatctggcgaattggaattcgtgcctggctattctgacggaggatctgggtgtgcgcaccgaacatggctatgtgctgaacggtcgtgcgaagggcgccgaggcgcgtggctgttcgatcaccgtcgacgaggtgatggcggccaacgcatgagcgacgtcgacattttccacgcgccgcgggatttcgagttccatgatttcgacacacgcaacgtcacggcgtccgatggcggcacggcgacgttgcgtttcccccgtctcgacgccgatgccgtgcatgcgctggcggcgtcggtgcggcggcatcgcgccgagaaactggcgcggtattccacggacgggatcgtcgacgtgatcgcgcgcgccgtagaattgtggacggatccggaatatccggaacgtcggcttgcggagcggctcattcccgcggtcaccggctatgacgcgtccatggtgcgtatcgaattgaagcggtacatgcgcatgttccgtcggcgtgagctgctgcgtttcgtggatgacgagttgaattgcccgcagatgcttgacgagtatcgcccgaaccgttcgggcggatacacgcggctgtacggtccggaattgtcgttccacgtgttttccagcaatgtgccgggcattccagtgtggagcatgacgatgggtctgctgacgaaaagcgcgattctcggcaaatcgtcgttcgacgagccgctgatgccggtgctgttcgcccgttccctggcaagcgtcgaccccgatatggcggacgctttggcgattgtgccttggcgtggcggcaccgtggatttggaggatgccgcgattggcgaggcggatgcggtggtcgcgtacggttcgtcgcacaccaccgaggcgattcgcccgcgcgtgcgtgccggaaagcctttcctcagctacggcgcgaaaatcggcttctcgctgatcggccgcgaggcgcttcgcgccgatctgtatgccggcaccgtgcatcgtatggcgatcgacgtggccacatacgaccagcaaagctgtctggcgccgcaaaccatgttcgtggaacgtggcggcgcgatgtctccggcgcaggtcgccgaactgcttgccagcgaattggacgggcagcagcgcaaatatccccgttccacaccgtccgaagaggagtccatggcgattcagcggttgcgttccaccgcgcagatgaaagcgctgatgctgggcgccggcccgatggccgccgcggccggcaacgcggatgatgcgccgtccgacgacccgttcgtggtgcagtcgcgttcgggcaccgactggacggtgctgtactatccgtccatcggcatggccgactcgctgtccacaccactgaaccgcaccgtcaacatcgtggcggtggaccatgtcgaggacgcgctgcccacgctgcgcccttacgcgcaatggttgcagacctgcggtgtggcgctcgctccggaccggctgttcgacgtggcgcaacgcgtcggcgagaccggcatcgaccgcatctgcccggtaggcgagatgaatcgcgcgaaatccggctggcatcacgacggcggcttcaatctgcttgatctggtgcatgccgtcgatatcgaacgtaacaccgatatgtactgtgatggtttcgatatggatgtcgaataatcacattcaagcaatcccacgaaatacgtatacccaaaaacgaaaggaatttccatgcagcagtccgattctctgccgttgaagggacgtgtcgcattggtgactggcgcgagccgcggcatcggcgcggcgatcgcgttacgtctggttcgcgccggcgcatgcgtggctattaactacgtcagcgatgacgagcgtgcgaagcggtgtgcgcaacgcattatggacgattgtgaggcggccggtcgtgtgatcacctgcaaggccgatgtcaccgacgccggacaggtgcacgacatggtatccacggtggtcgcaacgttcggcggattggacattctcgtcaataacgcattcgcccgttattcgttcgacccacgcaatcgcaagaccttcggtaccatcggatggtccgattacgcggcacagctagaaggatgcctcaaaggcgcatacaacacctgcgaagcagcgctgccgcagatgaggcgtcagaccggaggacgcgttatcaacatctctagtaacctcgtcgactccccgattgtgccgtatcatgactacaccgctgcgaaaggtgcgttggtaggtttcaccagatcattggcgcaggaggctggggcatggggcgtgaccgtgaacgccatcgcggccgggctcaccgttggcaccgaatcgagccgtgccaccaccgaggatgtacgcgagcgtatcatcgcatccaccccgttgggcagactcgccaccgccgatgatatcgccggagccgtggctatgctggccagcgatgacgcatcattcatcactggccagacactgcacgtcgacgggggcttggtgatgcgttaaagcgtggttttgactttggtttgtggcgccagcatattcgtcggcaaagaaggatggttatgaatatcaccgtgtatctcggtgcgcatgagggaaacgatcccatatacaagaaagccgttgaggaattgggcatatggattgcggacaatggcaacaggctggtgtatggcggctccgatgaaggattgatggccgtgatcgccgacaccgtactcgcccatgacggcgacgtgaccggtatcgaggcgcagatgtttgtggacagaggcgttgcacaccataacctaacccaactggttgtcgtgccgaatatcgtggaacgccggacccgcatgattgagcttggcgacgtgttcatcgctttccctggcggcacgggaacgttggaggaaatcagtgaggtggtgtcgaaaatttgtcttgaccaactgacccaaccctgcatcttctataatctcaacggcttttatgatgatatgaaggcattcctacagcacatgatcgatgcgggcttctccaccgcagaacgtcagcatggtatctatttcgcgtctaatctgaccgaaatcgaacgcgtcattgcagcgcataacgcataggaatcggcaaacgtcagaccaccggcagaacagcgtgcagaatcgtcatgaacgtcagcccgataacggccgtgacggtcaacgagaagcctgcgagtttggcgttaccggtcagcgaatcagtgaattttgtggagaaaatcgttaccggtgcgaatgcggccagtaccatgatttctcggacacgttcatccaacggcaacaggaaccatgcggacaatgcgatgatgatgctgaacaggaatcgccatgcgataactttgcctagttccgaacgatccttatgactgtcagggatctccatcatcaggccgatcatggccattgctgcgaaagcgttggcgttggcgaacggagtgatgagcgtgacgatccaatgcggcacactccatccggcgaacatgatcaccagcatgagcatatagcagtcgaacgaaatggacgagtagaaatcgtgcgcgatattcttgatcttcaggctcaatggcaggtttttggtggggcttcccaagtgcagcagcgagcgggtaatggtcagggatgcggcagtggcgatgatggcgttgcctatatcgagcataatgaccggcagacctgcgctcggtcccatgaaggtctgcaccaccggcagacaaaacgcgccgatattcaatcccgacgcgttgagcatttgataggcacggtagcgtggctcgtcgccacgtgagccgaaatacacgacgaacagcggaataaggcaggcgaacaagccgaacacgaccagccacaacaggttcatcggatgcttattcgtagcgaaactcatgatgatggcgcatggcagggtgaggttgaacaccagcccctgcaccactttgtaggatttgtcagagaagatatggatgcgcttaagtagatagacgctgatgatgacgagcagcaatgacccagcttggaacaacatacggccgagtataggagcatcgccgacgcatcatggaaccacccgacacaatgtgaccgtacgacgcacaaagatacttgcatgtccatgccgcacgcctcgaactaaacgactagcttaaagctttaccggagaatcccgaataaacgccgcgagataacgtatgactcccacacgaaccgtgacggttcgtatgggagtcatacgttcaaagccaccgcataagtgacctataagtggcctaagctattctgtcgaaataaaaacgtagtcggcagtaggactcaagggcgatgcggccgaccaccgtaccgcggcggcacggtggtcggaaccggatgacgtacgctagttactctcggagtccggaaacacgtcccgcgttcctgaactccgaggcgaatgtctcctccgtgataatttcggtgaccagtgcggaaatcagtttgtacaacgtgttctccgcaggatccgcgtcatcgtcgatggccagattgattccctccttgtccaggagggcgagggataccgacatcgcggtgcgcttgttgccatccgcgaacgagtggtcctttgcaagatggaagacgaaatgcgccacctgtccgaacagatcgggaagtagccccgacctccaacgcacttcgttggaaaaccgccgtttttggctattttccaacgaaatcggctcgtttcgaggatgaaaccggaagccgttttcctgctatatccggctatctccggcagacgtaagtacaccaataagtacacctggcggatggccgcatagcgaaacggcatggacgaaacggaacacatgccgagatacacgctgacgttggtcgactcgaccggcgccatggaaccgctgatactcatggacgacgacctgaagtcaatcgccgcgaagctggaagggagggtgtcggccaagacgcgcgggcgcctgccacgcggcaccggcggcatatcggccacgccgaagggctacagggcgtactcgacggtgaccgacccgctgacgggcaaggaccaccgtgtgtctggcttcggacgcacacgctcgcaggccgaggcgcgactcaaggagaagctggccgagttcgaccgcacccaccgcgtcggctacgtcaggccgcccaccgtggccgaatggatggaccactggctgacggacgtgtgcaagccgcgcctcaagccccgcacctggggcacgtacgcgtccgtcatcgcgaacaacatcgtcccctccatcggcgccgtcaggctcgacgagctcaagcccgcgcacttccgccgcatggaacgctacgtcatggaggagcagggcaaaagctccggcaccgcgggcagcgcgtggcgcaccctgcacaaggccctggaggacgccgtattggagggcgtcatcgaacgcaaccccgccgtcaagggcaccgcgccccgcgtggcgttgaaggaacgcgccgccctgacgcccgaccaggccgccgacctcatcgccgcggagaccgacgacgcctggcggctcatgtggatgctggccttcatgaccggcatgcgccagggcgaacggctgggcctgaccgaagacgaactcaggcgcgacggcggccggctcatcatcctggtcgaatggcaggcccagcacctgacgaaacgcgaggtcgagggactgcccaagggcgtcgaatgcacgccgctcggcaacggcatgtaccgcacgcgccccaagaccgagaagggccgccgcgccataccattgcccgaggccctcgccgaccagctgctcgcctacatcgaacgccacggcgtgaacggcgacgggctcgtgttccacgacgacgagggactgcccctgacgggcagcgtggagcgcaggcgctggtaccgggccctggaccgcgtcggcctgggccacgagtacgtaccccactccgcccgccacaccaccgcgaccatcctgaaccggctcggactggacgacgtgacccgcaccgccatcatgggccacagcagggtcagcacgacgaacgagatctacacgcacgtcgagctcgaccggctcgtcgccgccaccgacggcgtggagagggccatcgagggctaggcgcgaaaagacccgcggcctattcggcaaggccgtgggccatgggcgcggaatggcatggggactttcatgatcttccgtcgcgcgccgaccaaccggggatgacgccggatgcgggtctcagacgagccgcagctccttgcctccgggcagggaggcggtgacgtgcaatgttccgccgatgccttcgagatagcgtttcagcgtgtccaccttgatatggtccacgtcgcccgactcgatgacgcttatcctcttctggctgacccccagggcctgcgccaatcgcttctgggtgacgtgttcggccttgcgggcctccttgagctcgtagagccggatctcctccaacatgcgccgtttctcggcctcgacctcgtcgcgggtgatgccgctgtcggccatgaaccgctccggtgtgtagctcatcggtccgtctcctttccgtaccgctcctccagccatacgagatagcgccgttcggcttcaggtatggccttccgataccatttgtcccatttccgctgcttgtctccgcccaccaacatgatcgccttccgcttcggatcgaacacgaacagtatgcgtatctcgcttctaccggaagatccgggcctgagctccttcatcgaggggatgaggctcgacccttttatcttgccgactatcggacgtttgaggtcaggcccctgctcctccaacaatgacacggcggcgagtatctgcacccgcgatttatggtcgagcgtgttcagccaatcggctatgggttccaattcaactttccacacacccgcaaatataccatataaggtatgtccccgcaaatcggcgaaacagcaagggcataccgcaaaaacacgcgagaacacatcgccaaaggcgacgccccacgcccgaggccacatggcatccggcaccggccccgcggacgacaaggcatgacggcatcacgggcgaacgcatgggagaaaagaccgaaacaacgctagagtggacggcatgggagacttcgcaatgttcggccgcgcgatggcggaccgccatggcgtcggcatcatcgtcagcatcgactaccacggcgcctcctacgacatacagacgccgcgactgctctgcaagcacctgaccgccgccgaggtccaccccgtacccgcgggactgacactggcccaccggctcggcccggacgccacgcccgcgcgccggttcgccgcgacggccgtggacgacgggacgttgcagcgcctgttcgaggcgtacaaacccgactccgacgcgccggaccatctcctccaccggcagacgcggtacgcgttcgcccaagccgccgaaacgctcaactggcggggcatggccgacgccatggccacgcttccccgcgtcacgtccctgtcgccgtccgccacgctctacgactgggccatggatgtgatgtcggccgcatgcgacggcacggcgatgccggaacggccgcacggcttggacgccgaacgcgcacgcgccgagaggcggtcgaaggccatcatgccgaccacattcgcggcgctctgcgaacgcgagcggttggcggcgttcgcggacgtgtgccgccagtggcgggttctaggccaagtcgtcgaggctccggcggatggacgccaccaccgggtcggacaatgcggtgccgacgcccggcacgcttcgcaacgatccgatcctggcgagccgcatgcgcgcgtcggccgtctccacggcggacaacggcctgtggaatccgcgctcccattgtccggcgaacatgtccggatcggcgccgtcgtacaggacgccgccgtcgcggtcgatcacggtgagcctgtcgaccagcagcgacgcggcgacggcgcggaccgtggcgggcaggttcgccaccgcgttgtcatgcgcctccgcgggcgtccaacgcgccggcaatccgaccgaacggtcccggtagtagcgttccagcatcgccagccgcgacaggaccggcggcacggccagcgcggccccatacgcgagacgtccagcgtccagcatgaattgaacgggaacgtggaacggagccaaacgccctcctgcgtgcgaagccagtcgacgggaccggcctcgcggtagaagcccgggttggaagagatatacggtctggttggttttctttcgatgccgtcgtccatgccggcctccatgcgttccagaagactttcccgtcgatggcgcccggtcccgcgacgcatagccacatggcatgacagattcgaggaaaccatccacggccggccccaaggagaaaccctacgtgcccatcgagcaccgcccgctattgggcgtgtccgaagcggccgccctgaccggactggacgagaagatcgtccgccaggccatacgccaaggcgagctcatcgcctgctacgcccattcgtcgaccaaacgcatccgccggcgtgacctcgacgactggatctcatccctgcccgaacggccccaatagacgggcccgacggatacgacacggcccccgcatggctccttcgagtcgtgcgggggtcgtgtcttttccggacgtaagtacaccttaagtacacctagtacctatactgaaccctgaaacgtagtcggcagtagggctcaggggttccgactatcagatgtggaagtacagctcgtactccagcggggtcggggccagacgagcctggtcaatctcgccacgcttgatgctgatccaggtgtcaatcaggtcgtcggtgaagacgtcgcctgcggtgaggaagtcgtgatcttcctcaagggcgtccatggcctcagccagggagctcggaacctgcttgatgccagcgtgctcttccggcggcagttcgtacaggtccttgtcgaccggtgccggaggttcgatgtggttcaggatgccgtccaggcctgccatcagctgtgcggagaaggcgaggaacgggttgcaggacggatccggagcgcggaactcgatacgcttcgcagccggggaggtgccggccagtggaatacggatggcggcggagcggttacgagcggagtacaccaggttgaccggagcctcgaagcccgggaccagacggtggtaggagttcagagacgggttggtgaaggcgagcacagaggaagagtgcttaatcagaccgccgatgtaccagcgggcgagatcggacagaccgccgtagttcttctcatcgtagaacagcggcttgccgtccttccacagggactgatggcagtgcatgccggtaccgttgtcgcctgcaatcggcttcggcatgaaggtagcggccttgccagcgagggcagcggtctcgtggacgacgtacttgtacttcatcaggtcatcgcctgcatgctgcagggagttgaagcggtagttgatctcctgctggccagcgcctgccacctcgtggtgggaacgctcgagaatcaggccgaccttctgcaggttggcgaccatgtcgtcgcgcaggtcctgggtgtggtcaatcggcggaaccgggaagtagcccttcttgacgcggttcttgaaggcgatgttcggggtgccgtcatcttcggtgtcaatgccggagttccacggagcctcgatggagtccacctcgtagaaggagcgctgcatgctgttctcgaaacgcaccttgtcgaagatgaagaactcggcttccggagcgaaggaagcggtatcggcgatgccggtggacttcaggtaagcctcggccttgccggcaacctgacgcgggtcgcgggagtacggctcgtcggtcagcgggtcgacgatggagaatgccacgtcgagggtcttgtgcttgcggaacggatcgatgaatgcggtggaaacgtccggcaccagcttcatatcggactcgttgatggcctggaagccttccacggaggagccatcgaacggcatgccgtcggtgaaggcgtccttcaggaattcgcttgccggcacggtgaagtgctgctgaacaccgatcagatcggtgaagcgaacggagacatactcaatgccttccttgttgataagggcctcagcatcagccttggtttcaagtgcagtcacgggaccgctcctttcgaataagttacttacaggctattagtctatggtcgcgagtttcgctcactcgccatttgggttacgagaatgtttcgtaatgacatattcgaggtgtgatttcgtggaaaatcgcgattcgattgttacgaacagccacgtccgccccttcagaagcgttcatttaatggacaggcagcatgaaaaaggtcccgatcgtatgaatacgatcggaaccttccgtgacatcatgcgggtgctatgaccgtcagcggccgcgcatggcgcgacggctgacgcgctgcggatgcatcgggtcgacgcccttcggcacgctcatgccgttcttcagctgcagggtacgcaggcgctcgttgagcaccgtgagctcggtcttggtgagcacgaaacgagtcctcggatggatggcggccatcagcttgttcttgtgatgggtcggctggtagctcttgaacttgagcagcgtcttgcgcacgtccttgaggcgggtctggtttgcgccggtgccgacgtacatacggtagaccgggatttcggagccggcggtcacgcccttgatgcgctgctcctgacgatccatggctcgcttgacgcgattgtaatcgccttcgcccagcagatagatgccgttgtaaccggtaccgcgccagatggcgtccttggtcttcgggtcaatccacaccggttcctgggggaagttgaagccggccttgctgatgttgccgagcacgcttactgcggcaccgggacgaccttcgatcttggcgtagccgaccttgtcggcacgcttggtgagcatcatggtggcgaacagcacgcccagcatgacggcaagaatcatgaacaggatccagctgaacacatgccacttgaatatgacgcccagtacgacgaacacgataatcggtaccacgaacacgccaccgcacagccacggaagcgccttatcctcagcttgggtgtatttgaagatctggatgatctggctgatggtgccttgcttcttctgcttctttttctctgctttatctgccatcgacttcctcgcttgacggttcggttacacacactgggacgatagtctatcaggaaccatgccatttatggtgcgactgcgctattctactccgcctatctcgtatgcagcgggcgtccgtccgctttcagcaacgcctcaccgagcgtctcgctgaacgtgggatgcgggtggatgagccgtgccgcatcggcaagcaggacacggttgccgaccaactgttcggcttccgctatcaaatcactggcgattgggctgacgatgtgcacgcccaacaccacctgcatatcaggattgttcgcaaacgcaccgctgacgacggtcatcgatccgccttccccgctcatcagcatgcgcgcgttggacagcatcgggtatgccgtctccttcggctcgaccacgtcttcgcgcgcttttgcctggtcgagcgtcaatccgacgcttgctgcttcggggaaagagaacaccacctgtggcacggtgtcgtcaatcacgggttttggatcggctccggcgattttctcagcgatggtgatgccttgttcaaaggcgcggtgggccagcgcatgacctggagtgatgtctcccagcgcccacacgccatcaaggttcgtccgtccgtatccgtcgacggtcacgtatcctcgttcgtcgagcttcaggccgctggagcggaaccagtcggcgtcggtattgggcacacgtccgatggcggcaagcaccacttcgccgtaagcggtgcggtcctcatcggaatcgccctgccgatagtgcacagtggcccctaggttcgcgccagtgtcgacacggtccaccgcggtgcgtgcgatcacgttcactcccctgcgtttcagctcacgtgtcagcgtcatcgaagcacggcgttcccatgtggacagcacgcggtccttacgaatcagcagtgtcacttcgcaaccggcggcattccacagcgacgcgaattccaatgccaccgcacccgcaccgataatcaccgcgctggagggcaaggtattcagctccaacgcctgggtggaatcgatcagcgcgccggcgaacggatttccaggcaacgcaagcggacgcgatccggttgccaacacgatgtcgtcggcatcgatcgcaagttccgtttcaaccggttcgaacacgccggcttccacggaccgcgatacctgcgtctccccctcagccggcgtgacacgtactgtatgcgcgttctgcaatgccgcgcaaccgcggaatacggtgacgccgcgatgcgccagcaggcccgtcagccctttcgtcatcgtttccacggtggagacgcggaaatcacgcaatctgccgaaatcgatgctctgcagcgtggcgttgatgcccatgcgttcggcgttatggatggtttcgacgctatgcacggcggtcaacaatgccttcgatgggatgcatccgcggttgaggcatgtgccaccgagcgtaccgtcacgttcgatcaacgccaccgatttgccgagctccgcagcacgcagtgccgtagagtaaccgccggggccagctccgatgatagcgatgtcgaaatgctgttgaaccatattgaatcccaattcgttcctcattgattcgtttgcacgcacgtgaagtgagcttttgttcgatgcgagcaatcgttttccatggtaatggaaaagccgtcagttgttcgctgacggcttgaaaaatcaccggcggttctcgataccgatcactccggccagtgtccacgcttcgggtaacgaggcttcggaagcctccaacggcgaatttggatggcacggctccacgcataggaaccggaacgcatgcccttggccacggactgctcaccgaatttctcgatgagcttcttcttgagcttgtgccacatgaccgccacgtcgataatcacggcgaacaagtagacatacatgatcagcatgagcggcaacgccaatgcaggccacttgtaggtgacgaccatggatccgatcaggattatgaacgcgaccgggatgaagaactcgcccagattgaagcgggcatcgacgtagtcacggatgtagatgcgccacggcagacgttccgacttcggcatgtggttgatgtcgcctctctgcatggcatcgtactcggcgttctcacgctcacgcatacgagccttggcagctttacggcttgcctcgcgatccttggggaccaatggacggaggttctgcgcctgggcgtccttgcgcttcggggtcggacggcccttgccggaggtcggctgtgcagccttgctctcgacgttctcctgcgccggctcttccttcttggtaaacaaactcatgtctatagagcgtaaggtgacgtatcgacgctcgatgccgcccgcgatgccatttgcgttgcggttcaagctgcggtcggacggtctgcgaagaacggatacaatggacattcgtcacacgatattcaatccgcgtaatacacacgcatatatagggagcatcaaggattatgacagctttaggagccgaagagattcgcgcgcgcgtcgaatctgatttcagccgcatcgtcgacgtgttgaaccagaagatcgccttgcagtcgatttccgcgaagggcatcaccgcggaccatatgaagcgttccgcgcaattcgtggctgatctgctgcgcgaggttggtgtcgatacgaaggtagtgcagtcgcacaatcccgacggcacgccgggcgcttgggaggtcatcggttccaagaatgtcagcgaggacgcgccgacggtgctgctgtatgcgcatcacgatgtgcagccggttccggatccgagcgtgtgggacaccgacccgttcgtcggcactgaaatcgacacgcgtctgtatggtcgcggagccgcggatgatggtggcggaatcgccatccattccggcgcgctgaaggcgttgggcgatgatttgaaggtgaacatcaaggtgttcatcgaaggtgaggaggagatgggttctccgagcttcattccgttcatcgaagagcaccgggacgagttcgcttccgatgtgatcattgtggccgattcgggcaactggtccgctgagattccgtcgctgaccacgtcgctgcgtggcaacaccgatattgatgtgcatatcaaggcgttggaacatccggtgcattccggccagtatggcggcccgattcttgacgcgaacacgctggctgcgatgttgatttcctccatgtacgacgccaatggcgatttggccgtgccgggcgttgcgtccgaggaaccggttggcggactgcagcgtgatatggacgaggcgactgtgcgtgccgacgcgggcatcgtcgaatcgtatcgtcttgccggcaccggttcgctcgccgcgcgtctgtggacgaagcccagcgtcaccgtcatcgggttcgacgcgcatccggtggaagaatccttcaacgtcatctctcctgaaaccacgttccgtctgagcttgcgcaccgcgccgaaccagcgcccggaagaggcccaggaggcgttggccaagttcatggtggagcatgcgccgttcggtgccgaagtgtgggtcgacaagctcgacaacggcatgggctgggccatggatccgaacgctgaggccaccaaggacgccatggacgccatggaggaagcgttcggtgtggctccggtcaacaagggcgagggtggttccatcccgttcattccggaattgcagcgcatcttcccgaaggcgcaggtgctggtcaccggtccggaggatccgaaggccaacgcgcacagcccgaacgagtccatcagtctgccggcgttgaagaacaacgtcatcaccgaagcgttgctgctggataagctcgccaagtaagaagccgtgtaaggcttgccgaaataggataaagctctctgtcatacgattccgattggaacgtatgacagagagctttttcatttagctgccgattggggaatcatcatccattagttggacacgttgctgaacgcccaatgccagtagccggtgtagtatgcggtggccaacgcgattgccggcaccgcgatgcagatggcgtagaacagccagtcgaccgcatgcagtttcgattcgcgcgcttggcttcgcggcgcgtcggatccgaatccgcgcgcttccatggcggtggcgagtttcgttccacgtcggatggatacgacgagcaggctgaatgcttgcgagaagacgcgtttgatggtgctgccgtcgccgaggccacgcgagcggcgtgactggccgagtgcacgccaatcgtcctgcagcagcgtgaacatgcgcatgccggcaaggccgccgtatacgaaacgttgcggcaggtgcagaatctgcacgagtccgtcggccagatcggtcgggtcgagtcccaaagccagaatcacgcccggcacggcgattgcggcgacacgtaggaatgtggccaacgccagatagagcgatccttgggagatgacgatgatgccgcccagattggccagcaccgtgccggatgtcttgccgtacaacgccacggaaacgaagctgcctgtggccgctatccataccggccatgtcttgcgcaagaccgtccaaggagccactccgccgatccataacaatagcatttccaaaccaaacgccacggatgccgaaacgacatcgagggtgaagaacatcggaatgcacaggatcaacgcaccgatgaaacggcttaccgggttgattttcgccacgaaccatgacggtgacgccggcttcgtttcgttacgacgttccttgtgtggcaccacggtaatggtttcgagcttttcattgccgtcgcgcccactgtttttgttggtttcgagcatgtcactccccctctctgaccaaaatacggcgtgcgcccagcgcttcgatgagcggctcatcgtgcgtaatcatgatgaccgcgcaaccttggtcgcgcgcaccggcgatcaattggaccatgctggtccacgtggtgaaatcctgtccgaatgtcggctcgtccatgaccagcacttttggcgcggcagccagcatggacgccacggacagtcttcttttctcaccgcccgatagggtgaatggattcgctttggcgaagcgggaaagattcaggcgttccaacagcctgtcggcgatggaatacgcctcctcgtcggttttgcccatggatttggggccgatggccacctcgtctcgcacggtggatgcggcgaactggtgttccggctcttggaacaccatgccgatgcgtcccagcaagtcgcggcttttccatgtgatcacattgttttcgcgatggggaggtaccagatcgtccgccatgcatacacgtcctgctatcggtttgagcagtcctgcgagagtgagtccgagtgtggatttgcccacaccgtttctgccggtcaacgcagtcacctcaccggaatggaattcgaggtcgatatgctcgccgagcgggaaatcatagccgaagctcagatcccgcgtgtaaagcacgacgtcctgcggttgccggatttgttccggtttgggcacgtggctttcgatggtgcggcccggcacccacgcaccgccgtcggcaagcacctgacccatgtggccgaacacttcgtctggagtgccgtcggcgattacgccgccgacgttcgaatcggcttcgggtttgcccagcacgatgacgcggtcgaccaggtcgagccacacgtcgatatgatgttccaccacaaccagcgtctcatgggtttgttcgaggacgtggcggacagcgtcgtgcacttccttgacaccgtccgggtcaaggttggcggtcggttcgtcaagcagcagcaggccagggtgcatggccagcacgcccgccaaggcgaggcgctgacgttgcccgccggaaagtcctcgtgtggagcggtcgaacgccatgtagtcgagcccgacgatgtcaagggcggctcgtgcccggttccagatttcatctttcggcaggttcaggttctcgcagccgaatgcggtgtcgtctccggcacgttcgagaatcgtctgcgagtccgggtcctgaagcaccagcccgcaacgtccgcgcgcttgtctggcgtcgacgccgtcgatgagcagctcgccttcctgctcgccttcgtcatctccaccgagcacgccagccaaaccggacatcagggttgatttgcctgcgccggacgcgccaagcaacagtacccgctcccccggtttgatgtcgaagtcgacgtgtcgtagcgcgaaatccttacgtgaggcgtgtctccatccccaatcatgtgcggtcacgccggccgctgttgtgttctgaacgtcagtggtcattcgtcgttctttcttctgattgtcatgctgttgtttcgtatgccgttgtcatgcgatgcgccatcacaagaaaatcccgcaccaccttgatgtgatgcgggatttgcttgcatcggacaatcagaccagttcctgcgtacgaccggattcgaagcggtcgagcacgccggtcttggcgatggccacctgcaggaggtacatcaccgcgccggcgagcaccgcgccggaaatggcggaggcgatcaggtagatgctgacgcgtagcgcgctccaagccggattggtaagccagtagtacaggccgcagccgacgcctgcaagtgcgccggagatcgtggtggacagcaggtcccacttcttataggcgaagatggcaagaccgatttcggcgccgaggccctgcacgatgccgacgatcagcgagccgccgacgccccactggttgcccatggtgagttcgagcgcggccgcgagggtttccgcgaacagtgcggctccaggcttgcgcacgatgatggcggccagagggcctgcgaacagccagaaagcgttaagcaggccttcgaagcctggagtcaccgcctcgaagagggccagcggcgcggtgcagacgatgtcccagccccagaagatcacgccggatgcgacggcgatgatggctgcgacgacgatatcgaccacgcgccacttgttgttgtgtttgcgaactgcggaagactggttttcttcagtcatgggatatgtgcctttctcttttcgtcaaggcacgggaaatagagagacgtccgtgcgccggcattacccggtatacgttcatacggttgaagcggttgcttcctctcagccattcggcccccgtgtctgcgcctgatattacacaggacccacgatttacgtcggttttgtctcataacggattccgtattccgtggctgagtcgcattccgatgtgttgttttggaggaacgctccaaccgtatggtgattttattgaggcagtctcatcagcgattcggcaagattcttgaatgtttctccgataccgtccgaccgcaacgcgccctctttggttaggactgcgggccggcctgcttcgctggtttcgcgcagttcaggctccaatgggagttgtgcgagcagtggcacttcatagccgaggctgtgggtcagctgttcggatacgcgtgcgccgccaccttcgccgaagatacgtagcttctcgcctttgtgctcgtagtagctcatgttctccacgacgccgcgaactttcatcggcacctgcaatgccaccaggccggatcgtaccgcgatgtcggaggcggatggctgcggtgtggtgaccaccaccagttcggcgttcggcagtgcctgtgccacggaaatcgccatgtcgccggtgccgggcgccaggtcgagcagcaatacgtccggctcgccccaccatacgtcggataggaattgttccaaggagcgttgcagtcttggaccacgccataggatggctctgtccgcgccggcgaacatgccgatggagatcagtttcacaccccatgcggtgacgggcatgagcatgccgttgaggttcgtgggctgtgattgcacgccgaatagcctgggcagcgagaaaccgtagatgtcggcgtcgatggcggcggtatcgtagccgagcgccgcgaatgtggctgccagattggcggtgacagacgatttgcccacgccgcctttgccggaggcgatggcgaagatgcgggttttgatgccgggtttgttgaacgggttctgtttacgttccgctttgagaccggccaccagctgggtgagtttgtcttggctcatggagccgacttcgatgctgggaatcaacgtggcatcgggataggaggcgaccgcgccgttgatctggttggtgatggtctgcgacagcggacagccttccacggtcagttcgacccgcacccgtacgtcgtacgtgttggtttcgcctgccactggcgtggcgtcaatggctgcgatcatgcccaagtcggtgacggacctgcccagttcggggtcaatcactttgcttagccgttcgtagatgcgcgcttcgatggtgcgctcgtcgctcatgcttcctccttatgccgcgtaccacagtagcggttcgcggcacggcttgccagatggtgtggcgattattcaactgttcctgtgtcgagcagctgtttgaattggtcttcgttgagcatggggatgcccagttcctcggcttttgcggcttttgagccggcattctcgcctacgacgacccaatcggttttcttgctgacggatcctgcggctttgcctccgcgcagaacgatggcctctttggcggaatcgcgggagaatccttccaacgagccggtgaccacgaccgttttgcctgccaatgtctgtggtagtccgctggcttgggcttgtccgactcctacgccggcggccttccatgcgtcaagcacggcaccgcgccaattgcccggctcacgggccgcggtgaaccatgtgactacggattccgcaatttccggaccaataccgtcgatttgggacaattcgtccacgctggcatgttcgatggcatccaacgtaccgaacgcgctggcgatggtgcgtgcggtgggcggtccgagcctgcggatggacagggccaccagaacgcgccacaggtcggcatggcgggctttgtccatttcgtcgagcatcttgcgggtgttttccgccggacgaatgtacaccggctgcacgctggacgtgcctccacgggataccttgatttcctcgcggatcaccacggcgtcatccggcaccacgtattgcggatattccgcggtctcgtcgatgtcggcttccttgcgtttgcgggcggcggtaggcgcggtccagaatgcgggcacctgatgccataatccggatccgcccacgcgtttgcgcactttcttgatcttgccgtttgacccgacggtctcgtggatttcgatgattggggcctcgcgccagacgcgcacatccttgaggtctgcggacgtcaacgagaacagcccggcctcgctggacagcacaggtgtctgcatgggcggcagttccagtcccgccaccggctcgtacggttcaggctcctcaccgggtttcaccacgatttcggtgatgttcggcgcatacgtgtcgatggaatcgggcctgtcctcttcgggattcgtcagcgcaatggctgattggtcgcccagatgttcgatatcgaacgccttgcgggacgccagattgatgatccgctcggtcagctgcgccgggcaggattccacgttcgggcagcgtatatctttgtctccctctttggcgggagcgagttccgcgccgcaactcgggcaacgcgtgggcatcacgaaccggcggagctggccctcacgtcccttgcgccgctccagcaccggaccaacgagctcgggaatcacgtctcccgccttgcgcaccaccacggtgtcgccgatgagcacgcctttgcgttccacttcaaaggggttgtgcagcgtagtacgggatactgtggaaccggccacgtacacgggtttcaacaccgccaccggagtcacacgtccggtgcgccccacctgcacagtgatgtcaagcagctcggtatcgacctcttccggtggatatttgtaggcgatggcccagcgcggcgcccgcgatgtagcgccaagggaacgctgcaatcccaaatcgtcgaccttcacgacgatgccgtcaagcgcgtgttcgatgtcacctcggtgttcgccgtaatagtcgatcatgtcgaggatttccttgaacgacgtgacctcacggttgtgcggagagacgggcacaccccatttcttatacaattcgtaggcttcggattggtcgttgaccacatcatggccgttgccggcgtgccccgcaccccaacgcagcgatccgatgccgtgcgcgtagaagctcaggcgacgggttgcggtgatacgcggatccttctgtctcagactacctgcggccgcgttgcggggattggcgaatggcgcgcgaccggcgtcctcgttctcggcgttcagcttgttgaaatcgtcccatcgcatgaacacttcgccgcgaatctccacgaattcgggaatgtcttcctccggtccggcaaggttctgcggaatggtggagatggtgcgcacgttgagagtgatgtcctcgccggtcacgccatcgcctctggtcagaccctgttcaagcacgccgttgcggtagatgaggttcagcgcaagaccgtcgattttcacctcgcaggtcatgggcagtggcttcgattcgggccaatccaatcccctgagcacgccgtcgtaccattcgcgcagctcctcgatggagaacacgtcatcgaggctcatcatgcgcgatggatgacgtacggaagcgaagtcgttggagaacgtgccgcccacgcgatgggtcggtgactgcggtgagtcaagtgatgggaactgcgcctcaagcgattgcaggcagcgcaatcttgcgtcatatgccgcgtcggatgagacgggggcatcgtcgatatagtatgcgatctggtctgattccacccatgcggccacgcgcgcccacagcctggccgcggcttcggcgctcatcgaagccacatcaaccttgtcgaggcgcatggcgtcggcatcggtcggctgcaacgcggcaatccaacgttcgctgcccggagtcagcgaagccagcccctcatcggccacgacggccgcggaactaccgtcgctctccggcgcgtcgaaatcccatgccaactgttcggaatcatcacgattcgtcattgtcaccgctttcccatcatttccgccatgccgcgcggatgtccacgccagcaccgattatcgcacaaatgttcgactgtttttgttagttgttcagagagcgcaggaactgcacctgcaccacgtcggcaccgtcatggtcttcgtaatccatgcgcatcgcggccaccgacagggtgcgtgcgggcacgaacatgcctttgtccacgcagacgcgggccgcttggtgcatcaggggcgcgaccggcgtgttcggccataccggcagtccggcgtcggcgagcacgtggatggcttcctgcacgttggtcggcaccggaatgcactgcgattgcgctcttccgatcagttcctgcagttcgctttcgagcatggcgatacgtccgggggcgatctcctcgctcatgatgtatgaggcggcggcaaggtcgaagtggtcgcacatccattccgcataggcgaggcgatagtaggcgaatgaggcgtcttcccggtcaagcgcgacgttcagcgcgttgaggcatgccgcacgtgccggatcccagtcctcggcacgccccagctgcacggcgagcttgagatgcgacagcgggtatgcgggggcgtaacgcaccatggcgttcagatgcggcagcgcggcatcgacgcctttgacttgggcgagcaggtcggcaagctccatatgcatgtagaacaggttgtcggggatgagcaccgttctttcgccttcggtggcgaacatgcggttgtagatgacgcgttccgcatatgaattgaagtaccgcggcacgcccggattttcagcgaagatccggtccatgcgttcgagtgtggactgggcggattcgatggcccgctcgacgtctccggagaacagcatgtctcgtgccttcagacgttcgtcatcgagggattgtgccagttcgaatgagaagtcgggcgtgtcttcgccgtcgatcagcgcgctggtgacctgcggcgccaattcggtcaattccggatcggatatggaattgatgatgtccatggcctgtttggctttggccaccgattcgagtccgtcgctttgcgcaagacgatggaactcccccacggcgcgctgcaacaggtcgacacgctggatggacaggcccatcatgttctcacagccgaacaactgcgccgtgccgtcatcaaaacgaatgtcggacagttcgggttcttcttggcttcccgccggtgagaatcggctgtcacgaaggtcgaaggccgcatcgatgggtttgagcgcgcctttgccgtccacgtccatttcggcgtcgaacatgcggtatgtggcggttggatgggccaatccgtcagtgtcgagccgcttcaggaactcgtcgcgggtgaaggtgacggtcaccaagttgcgtacggtcgggtttttgcgcagctgcgccatcggatcgtcgtcatcatcatcgaggtaggtgtcgtactccgttttgtcgctggcgtcgtcccgcatggaggcgtcgtcatcgtcggcgtgtccgtccggtaccgcgaacgccatttcgtcgaagtcgatgtttttcatcaggtcttcgaactggccgtccaccgtatcgtctccagtgccaacgctatccgagccagccgaatcgtcggaatcgattgattcggatgagatatcggtggttctcggagtgacgggccgagccggatcgccatggtagtcgccgtcctttggagcggctttggatccggatggcctcatgtctccggtacggatgcgttcgaaggcgcttaacgcctcgctcatcaactcgctgatggcggaatcctgttcggctacggcctcttccagaccaatcgaatcgatgtgcatcgacacgcgtttgacattcggatcggctccgaagctcagcgcggccatcatgagtccgacgcgcagattgtaatcgacgctcatacgcgtgcgttcgacgtcggtcaggtcgatccacgcgcggcgcgatacgtcgtatcgggtgaacggcatcatggacactccagcagaagtgaagccgattgcgacttcgccgtcgctgaggtcgcaccggaagtcaacgtcgaaacggtatggcaggcgcaggctgcgcagcagacgggacatggtctgccggtacacccattcggaacctccgtcggcgccggaatcgccttccaacacgttgtccttggttgattcggcgacttcacgccggaagtcggccgcgatatccgccagtcggctggcggcctggatgccgtcttcccggttcgggtcgaggatcgcgccgaaccggtcgtccggtttcaacgcgatcagcgccggattctccagcagggcgaagtcgatctgcgcggcttcggcacgcgtcaccgtgttctccgtggggagagcgccgatgcgtgcgttacgttccagccatgagctgacggcggcgaagcggttgaggttgccctcgatgttgagggcgcacagcactgccgagaacggcagggaggaatcccatgcgaagaagtagcatccggaatagctggatgtgtacaggcgcagcggttccgctccgtgcacagcttcgagcccttgatcggtatcgagcgcgtgggcttcgcgcatcagatcggcgaagtagtcttccaggccggaggcgcgcatgccatgcgaccgggcgctcatggtgtctctgatggaccgtcgaatggcgcctatgggcgcttcgcggttgagcctgcggaaaatgttgccggaaccgaagccgacgagcaggccgttcatctgtggaagcatgtaggcggcgaagaaggcgatggtgatggcgtcccgatattcgaggtcgaaccgcatattcgctggcaggttggcgcgcatttgctcaagcgtgtaacggctgccggttttgagccatgaggcgagccacatcatgcgaccgcccggcatgcgtcccacgacgccgccttgcgtggcgcgcaccgttttcggattgcggctggccgcatggccgagtcttggaccgtccgccaacgtaagggtttcctctttgacgaagacgaaccgcggttcgagttcctgcgtgtccatgtccggatcggtgccggcgaagacacgcgctttgccgtccgcgagcgcgatttgggcgaagtggtcgctgtcggtgaacaatccgatggagaaggcatggccgtgggtctgcggcagttgggcccatccgaggcggaatcctccgggcacgccttcgaatccgtcgatgatgtgtcgtttgatgagcggattaagccggatggcgttgcgggtcagttcgtcgacgatgtcgtcgggcttgtcaagcgccttgccgaaggggttggcgtggatgtggcgcggcgtggcctggttgacgagtcgccgcacattttgcctgacgcgttcgagcatggtccggttatgttccggttggctggccgggtctgatggtgtgcggtgagacatgtgtgccattctttcaatccaatgcgacatgaagctattagaataatgacgtgactttttcgaagcagcgttttcaggcacgtcgtcgtatgtgcgcagccattgtagtcgctttcgcggtgatggtggcggtcgagtgcgtgttgtgcaatatgccgttttggcgttccttgaccgcatcgggtgattccgccgccgcgtacaacgtgctgggccctgggctcgaacgtactgacgaggggttgttgaaggtcaccgatccgacgcaggcatatatgcaggtcgatgcggatggctcgtcggaatatgttcgtatggacccggtgtcttcgaaggcgttggataaggcagccagacaatcggagcaggtgttgcgcacggttcgtgtccgtcctgatgtcaatcgcagggccggtacggtcagttcggtgtcggtgtcttcgccgcgttcgctgtatgtgcatgcggcggctgcaggtggttcggtgtgcgtgcggattgtcgagccgaagggttcgctgattccgtttgatgcggtgcgtgcgaacgtgcgtgtaccgttcgcgttgaatccgttgcgtatcggcgtgatggtggccgtgttggcgatggtactggtgtggaggcctggttcgcggttgtggcggatgccgttggatacgacgagtgtgaggcagcgtgcgtggctgggggcgctgctggcggtgcctgttgtggtcacttgtgccgttgtggtgtggcagctggtggaggcggctccgttgagcttccatacgaaaggcacgtacacgtatgatttcgaccagtacgattacgtggcaagggcgctgcttgatggtcacgcgtggttggatttggatgtgccggatgcgttgcgtgacgcggcggatccgtatgatgtggccacccggcagcggttgcttgccgatggcgtaagcccagtgtattgggattacgcgttctatcaggggcactggtattcgtatttcggtgtggttcccgcgttgttgttgttcctgccgtatcgggcggtcacatcgttgttcgtcgatggcgggctgatgatgccctgcggtgcggccgtgccgctgctgatgcttggttttctggtattcggatgtctgctggtgattcgtgtgatatcccgaattcgtccgaatgcgccgttggctgcggtcagtatgctgtgcgtgttcatgctgttggcttccaatggtttgtatctgtggtatcggacgaatttctattcggtgccgatcgccgcctccctgtttctgagcgtgttgggattgtggctgtggttgggcgccgccaagcgggtgccggtgtcaggcgatcggattcgtgaggttgatggcacgcagtcgttgtcgttgccccatctggctgcaggctcgatgtgcattgcggccaatctggggtgccgtccgcagttcattctcgtggcgttgctggctttcgtaatattctggccgcagattcagtcgattttccgtcacgcctccaatgattcctcccttccccatatgtcggtctggcgtctgatgcgcgcgccgttggccgcattgcttcccgcgttgattgtgatcgttcctctgctggcgtacaacgtggtccggttcggatcaccgctcgacttcggcacctcatatcagatgacggtcacggatatgaccagttatcggcagccattgtcgaatcttgcgctgaccgtcgcatattacctgttcctgccgttgcggttcacggatgcgtttccgttcctcgccgtcaatccggcgcctcttcccacttggggatttaccgaggcaatgcctggcggcttattcacgatagctccgttgacgttggccgcgctggcctgcccgttcctctaccggcgtatgcgcaaggccgggcgcacgaacacatggctgttgttgacatccagcctggcattgggattgctgcttgtggtgattgactcccgcatggctggtttgggatggcggtacatcgccgatttcggatggctgtttgccttggccgcgttgccttcgttgctgatcgtacttgattgcggcaagccgcgtctgcgttgggtatgtcgtgccggattcctcgcgctgctgctgttcacgctggttgtcgcgctgatgtcgttgttcctgcccgggcgtgacgatgagatgttgcgcaacaatcccgccctctatctcgacgtgcagtcctggttcatgttgggttgacgtccgacataagctacatccagtaaaaattcaggtttctttcctgattcatatagcagtttttccggtttgctctgagtttcatcggcaatcatagtgattgtcatcattgttgctttgagttatgttccgggggtcgccgaccatgaaaccgctttcgccgccacgcaaccatcctcaggccgcacgtcggatgccaaaggcgacatcgtgctgctcaccaccgaactgggccgcgacgacaacgccgtgcaggaccaagtcgtcaaactcgatgccgaaaccagcagtgtgacgcgactgttggatttcggcagcctgttcgccgattacaaggcgtccgccacgcatgcgggcacggacgattcggatgaactgccggtgaacctgcgcgcggttgcgcctgcggttcgttacaatcggcggtatgggtttcttcgattcgctgttcgccggtaaacattccacaccggcttcgtccgtcacgttccatctcgaccaggccgcccacatgtacgaggacggcaatatcggcttggaagccaccacgcttgatatcacacctgacagcaagcgtgtggcgataatcggcttgaacggcgcaggcaagaccacgctgctgaagttgctggacggagcgttgaccgccacgtccggaacggcccgcatcgaagcggacggtaccgcatacgaccccgccgtgaaacgcgatctgaagcatgtcgaggatctggtcggccgcgtgcggcgcgaagagattccgaacgcctactacaaggcggcttcgattcgtgaggcgatcgacctgccgttgaagaagcacaaggtgccggaaagcgaacgtcaggcgatcatcggcaatctgttcgcgcatttcgacttggcttccgtggcccgcgagccggcctccgctttggatagcgagaagcggcatctgctggcgatcgcggccgcgttgagcttctcccccgctgcgatcgtcgccgacgagccgaccaagggattggacgaggtgtcgtcgacgcgcgtggcgaaggccctgttcagctatgacaagcaggtggtgttcgccacgcatgacacggatctgatcgtccgtccggaatatgcgatcggccgcgtgctcgttgtcgacgaccatcgtgtggtgttcgacggcgcgcctcgtgaggcggtcgatttttacacggatttggttcgttcgaagtatgaggcggcgaagggcgacagggcgtagaagagatttcggactcggcagtccgttcagccgatcagttcgttgacggtgtcgatcaccacgtgcacgttatgccggaaatcgtccggttcgggcagtagtgagatggccagatagccgttggaggtcatgtcgaagaagtagccgggctgtccggatacgccgtggcgttcgatcatgtgcagcaccagctcgttctcgtcgagcacgctgggcacgcgcagcagtacgttccatccgccttcggcacgcaatacgctgacaagaccttgctcatccgcgtcgagcatggcatgcagtgctttgagattgccgcgcacacgttcctgcacgcgcgcggtctgcgatggcgccgcttcaagcagtgcgggaatttgttttgcgacgatctcgctcatgggcagatagtcgtcggcgatcacgtcgagacgacgcttggcttccgccacgtcttcggcgggacctgatacctggatccagccgactttggcatgcggtgcggcgagcattttcgaaaaaccgtccaacgcgaatgtgagcgcgccacgctcccccgcgagtcgtgcgttgccttcgaatggttccaaatcgtaatcgtagaacacttcgtcggcgatgatggccacgtcgtggtcccggcacaggcggacgatcgcctcgcgttccgacggtttgacgtacgaaccggtcggattgttggggttgatgagcaccagcgcgcggatgcgattgccgtccgggccttccagcgcggttttcagttcggccacgtcgatgtaccaggagccgtcgaatcgttgttggtattcgatcatgtcgacgcattcgaggcgtgcgatcgattcgatgagcggatagccgggtttcggtgcgagcacggcgtcaccggcatcacacagcagtttgataagccacgagtaggcttcggaagttgaactgaggatgtacaggtcgtccggcgagcaatggccgatttcctgcatgtcaaggaacgcggccagcgcctcacgcgcgtagcgttggccgcgcgggtcggcggagtagatgtccggcacaagatccggagccagcgcgtgccgtgtcggattggagtcgttgagcttgccgagcggtctgccggctgttttggcggtggcttccgccttggcgatgggattgggctcactgatgtcgactcttgaggaaaaacgcatgctctccaccctactccatggactgccgtcttccatctgcggcacatggaacaacgaaaaaggccgtccgacgaatcggacggccttgtgacaacctaatcggtcaacacatcacttctgcttggtgctcgcgtagtatgcggcgccgatgatgccggcctcgttgtgcagcttggctgcgacgatcggggtcttgatgtcgatgtacggcaggaacttctcggagacgcgggacacgccaccgccgacgacgaacagctgcgggtcgaagtagaactccatgagggagtagtacttggtcaggcgcttcgcccacttcttgtagcccatgtcgagcttctcgcggatggaggatgcggcgtacttctccgcgtcgcccttgcccttgagcagttccagatggccgagctcggtgttcggaatgagctcgccgttgaaaatcagcgcggtgccgatgccggtgcccagcgtggtggcgatgacgaggccatcctggcccttcgcggcgccgaactgctgctcggcaagaccggcggcgtcagcgtcgttcaccacggtgaccggacgaccgcaagcttcggagaacacttcggtgacgtccacgccgacccaggactggtccaggttggccatgtagccaagcttctcgcccacatgaatcggagccgggaaggcgatgccgaccggagcggactccggaacctcgaaatgctcgagctgctggcgaacgatttcgccgacggccttcggagtggacacctccggggtgaggatcttcagacgcggttcggcgaactcgcccttctcgaggttaaccggggcggccttaatgccggagccaccaatgtcaacgccgaatgcctgtgcagtctcaatcatcttcaacctctctatcaaggtatgttatgggtgtattcgaaccggtacgtattatggtaactcgcaacatgcccaaaatcgcgcgcgacatgcacaaatggtgagaacgattgcacaaattgtaatacttaaccgagtaaatatttcatcgcctgttttgcaaacgattcgtcccacgtcggtagaggctccgacgtgggacgaatcgtcaatcgcgtgatcgccgcgcgttgggaaacgcgtgggccacggtattacttcagcggcggcatcggctgccattccggatcatgcagcagcttgcgcgaatcccaccatcccttggcgatctgaacgatgccggtcttgaaatgctcgcggtccaccatcatcagtcgaatcacttccttgaccgcggtcagcaccgtacccagaccgaacaacagcggacggtaatcgccgtacgtcatgaagtatcgggccatgtagccgcggttgcgcatgatgtggtagcggttcatgtcggaagtggagttgagctggcgcacgccggcgatgtcccaattgccgatctcgcgcgtacggcgcagcaccacgtcgggcacgacgatcggattggtgaccttgctggcacgatagccgtacatcgtgtcgtcccaatagatgaagaaacgcgggtcgggcagaccgatcttctcgacgatgttgcggcggaacaggccaccttcgaagcacaacgtgtccatcacgcgatagccagccgggccgaacgcagccggtgcgatcgggttcggaatgccgagcgggacgatgaaatcgtactgccagtagaacggaccgccatcatagtcgtagcggcttccctgaatcacgtcgtgccgatcggtccacttggccaagcgctcgatgccttccggcatgacggcgacgtcgtcgtccatgacccagaaccattcggcacccagctcgtacgccttcttcacgcctgcggagaaaccgcccgcaccaccgaggttgtcggtctgcggcgcgtagaccacgcggttctcgttgccggacaggtcggccacggtggtgccccactgcgcggtgagtttggcgctgaattcttcgaccatgccatgggtcttgtcgctgtgctcgttgtccacgacgatgatgcgccacggggcgacggtaagcttctcgatggattcgaacagggtggcgagcagctgctggcgcttgtaggtcaccacgacgatagccagcttttcgatggtcttcttcgcaacttgcttttcagtcatacgttccattcttgcaccggccctcaaccacacatcggccatgttcgatatggagccgagcacgggcataatccgcgacaaatatggacagaaccttgcacggcacgaacttgtttgccataatgaaccgcgtatgcaggggaatccgtatgacggattgagatgggcgtggacgtccgaaccctttgaacctgatggttgacaccagcgtagggaggcatggccatatggctgatgtgatttccgtaaccaattccgattccgcgttcgacgcttcgaagggcgtcacgcgaaccaatcttcccccattcgcgcagcggctgcgcaaagccgccgacctcgtatgggaggaaggctacaggcagccgttcatccgcgaactgggcgaaggcactctgccgcgcgagaagttcgcgttctatctgctgcaggatttccgttatcttaacgactacgccagagtgcatgctttgggactggccaaaacagacgatcctgagatcatggcgttcatgctcaacgtgcagaacggcgcgttgaatgtggagtcgaccgtgcaccgcacgtatctggccagctacggcatcaccgacgagcagatgaacaacgtgcgccagtcggcgttcgcccgcgcgtacacgtcgaacatcctttccatcgcctatggcaaggacatcctcgacattctcgtggccgtgctcccctgcgcctgggtgtatgcggattacggatatcgtcttgcccatgaattcgccgacacgctcgatgtgaaccagtacaagagctgggtggacatgtacaagaccgacgagttctggcagggttcggcttggctgatcgagcatatcgaaaaactcgccgccgaggtgagcgaggaacgtaagcaggagctggtcgatatttttgtgaccggcgttgagaacgagtacatgttctggtccagcgcgtacgacatgcagtacacgtggaagcccgaatgggatcaggagagctgattctccggcacgctctcttccgattgtttatttccatatgaagcggcccgccttccgattggttccggagggcgggccgcttctcatataacgttcggctcgctattcgcgcacgagacgaatgtgctccacgtcgtcacgctgggaacgacggtagagcacgaaacggttgccgatgacctgcacgagttccgcgccaagctgttcggcgagaccttcgccggcctccttggcggtcagaccggaaccgtcgagcacggagcatttgatgagctcgcgcttctcgatggtctcgtccgcctgtttgacggcgttttcgctcagatcgttcttgccgacctggatgagcggattgagtttggtggccaggccgcgcagctgcttgacctgctttttggtaagtgccatatgtgttccattcctatctacaaatacccgctcaagcctagcgtgaggacggtatttgcccatccgcccgcaacgcaccggtcataacagcacgcccagcacgaccagtgcgacgagatagacgagcaccacgatcgccacggccacgtccatgccggtgacgcgcatgacacgccaatgcgtgcgcgtcgcaccttcctcatagcagcgcgcgtccaaggcgaggctcaggttgtcggcgtggcggatggctgcggcgaagaccggcacgacgaccgccaccatcgctttgatgcgtactacgaacgaacctgtttcgacgctcccgccgcgcgccgactgcgcgtcgatgattgctttcgtttccacaccaagcgtcggtaggaaacgcagggcgaggctcatcaccaatgccgtctcctgcgtgtgcagaccgaatctggcgaacggtgacagcagcgattcgaacgcgtcggtcatggcggtcggtgtggtggaggcaaggaacatcgctccgatgacgatgaccacggcgaaccgacatgcgtagagtagggcgatgcggatgccgtcatcggtgatgggaatcggcccgaggctcgccaccgtggtgccggtgcgcacgaagaagatgttcagcaggccgcagaaaacgaacaatgccaggaacacacgcacggaagcggccaatcggcctacattgatgcgtccggccgcggcgatcacgccggtgaacaccacggcaagcagcaattgccagaatgagccgatggcgaacgcggagaacatgagcgccaatgcggacagcatgcccacgcgcggatcgaggcgttccaacagggtccgccgctcccccacggtcgcggtgtccgagccggcggcgtccacggatgattccgcatccggctcctcttcgcaggtggctttcactgtggattccgtggattccttagagtccgcacgtttcgccggcttgcccaatatgatggtacggtcggcaagctcgtctacttcatcctgcgaatgcgagatgagcagtatggtcacgccgcgtgatttgagctcgtggatgagcccgtgcacgcgtgcggcggcctcctcgtcaagacctgcggtcggctcgtccagaatcaacgctttcggctcgcatgcgatcacgccggcgatcgccaccagtcgctgctggccgcccgacaggtcgaacggcgaacggtctcgcagatgttcgatatgcagcagccgcatggcctgcatggcgcgttccatcgcctcggacgtatccaatcccaggttggaaggcccgtatgcgacgtcttcggccacggtgtcggcgaacagctgccgttccggatgctgcatgacgtagccgaccgtacggcgcagcctcgcacggtttttgcgattgaggggcttcgttccgccgttcgccttcgcagtggccacggcgatgccgtcgatgacgatcgagcctgtcgtgggtttctccaacgcgcacagcatgcgcgccaatgtggttttgccggcgccattgcgtcccatcaacgccactgtctcgcctttgccgatgctgaacgacaggtggttgaacacgtcacgttcggcgtccacgtaacgatacgatatgtcgcgtgcttcgatgagcgtttcggcgggctcatcatcaatgcgtttcggcaggcccaccgattgaaccggcatccgaagccgctcgtcggcggggccatcgcctacgatgtggcctgcttccagctgaatcacacggtcggcatgttccaactcgtccgcatggtgcgtgacgagaatgatggtggtgccgcggtcctgaagttcgtccagcacccgcatgatgtcggcgcgcccttgcgggtcgagcatggcggttggctcgtcgagcacgagcacatcggaatccatcgccagcatgccggcgatggcgatgcgttgttgttggccgccgctcatgcgcgtcggatcggaagcgcgatagtcgctcatatccacggcgtccagcgaaccggagatgcgcaggccgatctcatcatgctcaatcgcaagattctccggtccgaacgccacgtcgtcttcggtgacggtggtgacgatttggtcttcgggatgctggaacaccgcgcctatgccgcaacgggcggttcgatactcgtcggcgtgcgcaccggactcgtcgaacaccacattgcctgacaatacgacatatccctcatcgggagccaccagtccggcgatgacacgtgacagcgtggatttgcccgaaccgttcggccccgtcagacagatgcgttcgccacggcggatgtcaaggctcacaccgtcaagcgcccatgtcgcgccgccatcataggtgaatcgcacatcgcgtagcgttatgatcggcgcattggtcgtaaccataaaatcttccttcaccagcactgtatggaattctcggggaaaacaagacggaggaaccctccggtggatgcggacggtccctccatgttcatttcaatgggaaacaaacgaagctcaacggttcagcaggttggagatcggcttgtagatcaggaacgtgaccacgccgtggatggtgaacttcaacgcgttgaacggcaggagcgccggcactataagcgccacgacctgcgcggtggtcatgtgcgcgtagaacggcgtgacgatgatgttgccgacgatggcgacggcgagcgccacgacagcgccgacgatgatgccgatcagcgcgcccttgcgcgtcttgttctttttgtagatgagcgatgccggcacggacagggccaatgccacgagcacggccatcagggtgccccatgggttggtgaacaggtgcggcacgaagccgagcacgctgacgatgacggctgcggccgggccgaacgcgaagcccgcgacgaggcagacgatgccggatgggtcgtatttgagccattgcacgcctgggatgattgggaattcgatgaagctgacggccatggacagcgccacgaacagcgcgtacatggcgatgcgtttggtggaccagcggccggagtcggcgacgcctgtggagtgcgcgttgtccggacgggtcatcggcttgtctgcggcctgatcagctgcggtattggaggtattgctaggagaggatacactcatgttgagctccgtttcttccatccggactgtaaccgttggccccggattctcaccggatcagccgctttcgcgggtcgcgggcttcggtatggggccgttatgaatgccggtcgtgccgttaccgccagtaaggattttcaccttccctgaaacttgcttgtccatatatacgcccgccatgcgatatgcgcaacctgcgttccgttttcgtcttgcgattcggaacgcagcctgcgcacgccgcgacagcgggcatgttatgacagcaggtcgagcagatcgtccttgctgagcgtgccgacgccgccggatgcggtgccgtcggtgaattggcgcgccagctcgtttttcttttcctgcagtttcaggatgcgttcctcgatggtgtctttggccacgatctggtatacgttcacgtcctgggtttggccgatacggtgcgcgcggtcggttgcctggttctgcgcggcggcgttccaccatggatcggcgtgcaccaccacggacgcgcccacgaggttcaggcccgtgttgccggctttgagcgagatgaggaatacgggcacgtcgttgccgttgaattcgtcgaccagttccacacggcgtttcttcggcgtctcgccggtgatggtgtagtattccacgccttgttcggcgagtctggtaccgatgagttcgaggaacgaggtgaattgcgagaacacgaggacctttttgccttcgtccatgcatgtggccacgagttcgacgatggcgtcgagtttggcggaggcgttcttcgcgtcggcgtatacgagtcttggatcgcagcagatttcgcgcagcaaggtgaattcggcgaggatgcggatcttcttggtgttgaagtcggcgtccgacgccttggtgagcgtggcgcgtagccgctgttcgtgtgcggcgtacagtttgcgctgctctccttccagtttgacggtgagcacgttctcgaatttgtcgggcaggtcggtgagcacgtcttttttcagacggcgtttgatgaacagtcccaccaatgcctgcagtttgtcggccatgacggaatgttccggaccgggagccatgatcggctgctcgtatttttcgcggaatttcgtataggtgccgagcagtccgggcatgaggaagtcgaaaatgctccacagttcgctcaaccggttttcgattggcgtgccggtcagagcgaagcgatggtcggccgtgacctgtttgaccgatttggccacctttgtggcgtggtttttgatgtattgcgcctcgtcgagcgccatcagcgcgaaatggcaggctgcgtaatcgtccacgtcgcgacgcagcagatcgtaggaggtgatcaccacgtcggtgccgtcgtacgtcgtggcgccattcgtcgtagcaccgtcgttctcctgcgattgcgcggccaccgtcgcgatggccttgcgtcgctgcgctttcgtaccggcgacgacttccaccgtcagatcgcccgcgaatttctcgcattccgcggcccagttgtagacgagcgatgccgggcagacgatgagtgacggaccgtttcctttgcgcgcttcgatgagcgagagcagctgcacggatttgccgaggcccatctcgtcggcgaggatgccgccgaagcccttgtcccacagggtggacagccattggaagccctccacctggtatgggcggagcacggttttgagccgttcgggcacttcgtagcgtttcggatcgacgatcttcacatcgttgacatagtccacgaacgaggcgcttttgccttcgtcgtccacttgggagtccagcaggaacgcttggtatccggggattttgatgatgccggagtcgagctgtttttcactcaggtcgaggtccgtggacacttggtcgagctcatgcaggtcggcttccttcaaatccacgaacgtgccgtttttgagccgatggtagcggcgttttctgcggtaggagtcaagcagcgcgccgacttcgttcatcggcacctcgtcggcgatcggtgagatttcaacgaggttcgagtcgatggacaagccgaccttcaccgatggcgggttgggctgcatcatgccatcgaatgccgccgtggagaagacctggcccaccgatttgaggatctgcacgccgtcggtgagcatgagcaggatagcctgctcgtcctcttctttgacgcgtgccacgtcgatggagctccatgtagggcacagctggcgtaccacctgcacggcgaacgattctcgtgacaggtcgcgtttgacctgcgaggctcttgaacgtgaatcggggttgatcacgccgcgcagttctttggcggtgggcaccagttggaaggtgaagtcgccgtatttcgccaccgcttcgcaggtgatgccgtacaaatcacggtccagatagaattcgatccggcattcggttcccaccgcttcggtcacttcctgcggaatgtcgaatccgatgcccgcttcggtgagtttcggcacgatggttcgggcgaacatgggccagtcgttttcggcgatgaacacgccgtccggatcgtcgaaacacaggtcaggcagcacctgtaatgccgggcgcagtttatcggtgcagcggaagagcccgtcgatgcctatcctgtccgtctccgtggaatcgtcgggacgttcgcggctgaaaatgtagaagccgttgcgtccgttgatgacatcggagatgctttggttcgatgtgatgcgcacgcccgacgcggtgccctcatgcacgtaggacgccttgaacgtgaaggtggggtcgccttcgacaatgtcaaggccgaacggttcgcctccttcgttggccatgtggatgcggcttggcccggatttcttggtgcgttggaaatcttcgataagcaatcgtctcagcccgtcaccgtccgacgtgcgcaggaaaccgcgggccttcgactcgtgttccttgtattcgtcctgtgtcacggcgtggaacaggtcgagcaggtcgcatgcctcccaatcggtgaggacgagttcacggtcgatgcgtaccgcttcgccgtaatagtatccgttttgcagttgggccgccgttctggatgcgatcacctgctgtaggaagcggtatagcttcagcgagaaggggtcgagcatgtccggagtgtgggtgaacgcgagttttttgccatatgactcgtatgttcccgtccgcatgtcggccacgaatcttgagatgtttttgagcgcatagtcggcgtcgccgcatccgatgcgcagggacaggcgcagggcgtcatggccgttgatcagcgtgggctcgaggtacacgcttcccggtttgacgtcgaccggcgcgcttgatttgcgtttcggtttggcggctccctgtccggaggcgccacgttgttcctcgatcaatcggcttttcgcgttgatgattcgtttcagcacgtcgagttgggcgttctcgccggcgttgttgcttttcgcatcgagggagcgcatgtagtcggcgagggcccggggtgttgcggctgcggcgtggaatccccggaatcgttccggctgttgcaggaacagcagcagcatggcggctacgtgcttgcacatgccggtgtaccggcggctggtggaggaagccgagtcgtcatcatcgttgacgtggccgtacgtgctgccggagccgaaatcgtcgtagtcgtcgacgtaatcgtagtcgtcgtcatcgtcgaagctgcggtatttcggactgttgtggtagtcgaaggtccggtaggaaccgtagccgcgctgcgaaccgctgaatgccgggcaggagcagtagcgtgccagaaacagctcgtcggcgaaatcaagcgtggcttgcacttcgtaacggctggagggtgaggtggtgccccgtatggtggcatacagggtgatgcggttggatgcggtgtcgttcaggcaatgcaggtcctccattttggaacgccattggttggcgatgccgcgggcgcgctgcagtaccggctggctgcattcgctgcgcagctcgtcggaaagccatgccagagtgtccgccacctgaacccccatcgttcgtacgtttgttctcatgcaaccataccagcgcgatggaacagcaaaagccgcggcccgatccggaccgcggcatgttatcgcccgtgttgcgtcagcggcagcgtttggtcagcggctgccatgggtcgagttccaccggctcggtttcgagcagcgctcgggtggcgtcgtcgaggtattccttgcggatgatgatttcggtcacatagcggtcgaaccacttgtcggaggccacgtagtagccgtcttcgccgttgtctttgccccagctgttctccactttccagcggttcggcttgccttgctcgtcaaggttcacgccggtgagggtcatggcatggttgcttggactgtcgccgtattcgaggccgtgcgccttgtcgaagtcgaaatcggtgccgaacagctggtccacgcgcacgctgtcgcagtcgaaatagccggccgcacgcagcgagaactgggtgcagtcgcaggcgaaccagatcgggtgtccggcgctaatctggtcgaccgcggcctttttgaacacgtcgagcggcacgttgacgaattccatatcccccgcttcggccacattggcggtgtagcggatgcggtaacgcttgttgaacggacgggacgccatcggcacgttgcacaacgtcaccagatcgtcgacgtccaccggcacgtacttcttgtagaattccatcggcgtgatgccggtttcgcggatctgtctgcgctcgtccttgccggttttcggcttgtcggcctcgtcttcgccgcttttcttatcgtccttcttgtcatcgtcgctcacgcgggccaggaagtcgaacttctccggcggctcgcccaacgagatggcgcacatgcggtacacggtggacatgtcgtcgtccttgaccgcgcgcagttcatcgaccgtggcgccggctgcgtaacgttcgcgcaggtcggcggcgaactggcgcagcctgctgttgaggtattgtttgaacgcgtcggagtccttggaattggcggattccgggtaggcgctcttcggcacgagaccatacttgtctacaagggcggcgaacatctgccaccaaccgccgtcatcggccggcccgtagttgatctcctggaacaggcggctgtcggtcggctcgtcgagcgtggcgaacacgttttcgagatacgtgttggatttttccatcgcatcccagaagaacaggtaggtttcggagaattcgaaatcgtcgagtccccactggtgcatgagctcgtaacgcagggtgttgagggatgcgaacatccagcagcggccggatcgtcgctggttggtgatggacccctgtttcagttcgatggagaagtcgcgtggcagcgcgcgctggcctttgtagtcggtggcggcttcgagcacgcccgaggacaccgcggcgttggcggccacaaggttggcccggtcggcgttgaagtctttggcgtattgtgcgagacgttccggtttgattgctgtgatgctgttggtcatacggccgattcttgccatacgtcttgacggatgcgaaatactggtttcggcatgccgaaaaatctgccgtaaataagcgattcgaattcgttccggggatattcttgtactacttgaggggttttagggtgaggagcgtatcatgcgtcgtcatggttcgatgatggttgttttgtccggattgctggctgcgagtctggccatcggactgccggtcggttcggcgtatgcggacgagccgacggatggcaccggggccggcacgtccgccacggaggtgttggattcgttggaggtcaagggccgcgcgccgaaaaccgggtacaagcgcactcaattcggcaaggcgtgggccgacgtggaccacaacggctgcgacacccgcaatgatatcctcaaccgcgatctgaccggcgtgaggcacaagtggcgtacgcacaattgcgtggtgaagtccggaaaactgcatgatccatacactggcaaggacatcaagttcaagaagggcaagaagacttccaccgcggtgcagatcgaccatgtggtggcgttgagcgatgcgtggcagaagggcgcgcagaagctcagcgaggagcgccgcaccgcattggcgaacgatccgtacaatctgctggccgtgcaggggcgtgccaaccagaagaagtccgatggcgatgcggccacgtggctgccgtccaacaaggggttccgttgcgaatacgtggcgcgtcagatcggcgtgaagcacaaatactcactgtgggtcacgcaggccgaaaaggaagccatggccaaggtgctgtcctcctgcccgacgcaaaccgtgcccgactacacgggggtcaaggattccacagccgagaagaccaccgagtccgagcagaccgaacagacgcaaaccgaacagacgcaaaccgaacagacgcaaaccgaacagtcagctgagcaggcccagcagactcaacaaacgacacaggcacctgcgctcgaacccgctccggctccggctcccgcgccccaaccagcgccacagcaggacgtctactaccagaactgcaccgcggcacgagccgctggcgccgcacctatctaccagggccagccgggctaccgttcacaactggaccgcgaccatgacggagtcgcctgcgaataaatccaatacagcgtctccgcctttccggttgtaagacgtatgacggtgaggcataggaaaagcgccgggttattcatccggcgcttttcctatgcctcagcctctttccgcattttccgcagtgcagtcatgagaaccgctatggtctgcgcagccgcgcgatgtcgtcacgcagctggttgacggtgtccgtcagttcccgcacattgtggcgcaactgttccgtttccgattccgcctcgtccgcgcgcttgtcggtttcgtcacggacacgatcgactatccatgaggccagtgtcgcggtgacgatgccgatcagggccacgccggttatcatcagcccgatggcgatgcttcttccctgccatgtcaccggagacaaatcgccatagccgactgtggtgacggtcacgaacgaccaccatatcgcctcgccgaaatcggtgatggaagcgcctggaaccccacgttccacatccaattcggcaagggcgccgatatacatcagcagtgtcacgctgcagcatgtgtacagtgtgatacgtccacgcaccgccatgccaccggtacggttgagcacgttgagcaccgccaccaatcgcagcagcctcaatggtctgaagatgggcaaggcgatggacaccagcatcagcagattctctttgaaccaggctttcttgtccttcgccagcagaatcgaaacgacgtagtcgacgatgaacgccatccagatgatgttgatcaccgtttcgcacaatacgatatgcgttctcgccagcacttcccacgaatacgcgaacaggaacaccaacgccaatgcggtcatgaaccactcggtcatccgctgccatttgtccaatgtcatatctcccgcctttctccccatggctgccatcatacgggtttgcccgtttttgtgacgtattccgggcgcggtgcatgtgccttcagaccagatagacctcctcatgtggttcgtttcagagttcatctcggaggccgtccgattcggaccattcagccgacgaccgaaggagcggatacccacttttaatgaacgtcagcccttgagaggcatgcggttgtcgagcgattgtccgttggcgtagcagcgcacgttgcccaatgcgatggcgatgatgcgccgttcggtggactccaagtggttgccgcccgccacatgcggggtgatcaggcatttcggctcgctccataatggcgatgccgccggcagcggctccggttcggtcacgtcgaggccagcgccgcggatcatgccgttggcgagcgcgtcggcgagcgcctgcgtgtctatggcgtcaccgcggcccgcgttgatgacgatggcgtcggttttgagttttgcgatgcgttccgcgttaagcaggtggtgtgtggatggcgtggatggcacgcacatggcgatcacgtcggcgtattgcagcacgtcgtcgagcgattcgaatccgaccatgtggtcgatgcccggcgcttcgacggtggggttgcggcggatgccgatggtcgacatgccgacgctcttgcataggcgtgcgaaatgcgatccgatgtcgccggtgccgatgatgagcgcggttttgccgtcggggctgatgacgcggccggcgtcctgccatgcggcgttcgggttgccgacggcgtagatgtgcaggtttttcatgatggaccacatcatggcgaacatgtgttcggacacgctttgtccgtaggcgccggtggcgttggtgagcatggagccggggtggagcacgccaggccgctggtatttgtcgacgccggcgctccaggtctgcagccattcgagtctggggcattgcgcgcatgtttcgggcgtgatgttgccgatgaccgcggttgcatacgctttgagttcgtccggtatttcggcggtccagttcatggagcctcgttgtgccgggtcgccgacgaattcctgcggcatgccttttgcggcgcgtgtgaactgcgcacgttcggattcggtcaacggcaggcagttgacgatcagtttgcggtcgttccatattcccatgcgttttaccctatggcaatcgtcggatatagggtttcacgttgggttttgggtcagacgccaagttcgtcggtgtcaaggatgatggtgaccggaccgtcgttggcgagccgcacgcgcatgtgggagccgaatcgtccttcttttacttcgagtccttgcgcgcgcagggcgtcgttgaatccgttccatacctgttcggcatggtcgggcgcgcctgctttcacgaagcttggccggttgcctttgcgtacgtccgcatacagcgtgaactgggatatcgacagcacgctgccgtccacgtcgtggatggaacggttcattttgccgttctcgtcttcgaaaacgcgcaggttggcgattttgcgggcgagccagtcgatttgtttcgctccgtccgtatcttccactccgacaagcagcacatagccgatgcctatatgctgtggttcgaatgtggtgtcgacttctccgcttgtctcgtcgaccacgtcgacggatccttcgctgaccttctgcaatacgatgcgcatattccgtcccgttcttttcagccggcgtagtcgacgatggcctgcgtgacctgtttcagatagtcgagcgatgtctgccaatcgtccggcacttcgatggaatgattggcaccagcatacgtgcgcacatggtcggtgagcagatgcgctttggcgtcatcgtagtatgggtcggcgtcacctgcgcagattagcggcatcgggctgccggcagttcccggcagcggcgcgggaatgaccgacttgtgcttgtcgaatggcggcggattgagtaccggggtgagcagcaccacgcgcaatcctagctttgcggaatgcggatatgagagtgtggagagcgatttggtgacgaccagcaaatgcggctcctcacccgattcggcagcatgttcgagtgccgccttgcgccattcgtcgaccacgcgttccatgcaggcgatcatttccggaaactcgacgctttccgtcagtttcaggtcgagccggtccacgaaccatccgttggccgcaagcgcctgcgctgcccagtacagcagcggtcggtctacggtgtagccgatgcccggcatgatgagcacatgcttgccggtttcggtgttcttcacacggttcttgccccatggcgtgaccgcgggcgtcacattcttcgttttcgttgactttgcgctgttttcgttgattttgcccatgccctgccgaatgtctttcgatgtcttcgtatggttcgaccaccgtctcggttttccgaagaccggtttccttcaacgcatcatagggcacataggctacatgggcccatatccttccatattgcgttcattccgttcggagaatacggaagaaccgtcacgaacggtcggtcgccacgcgtctggtggtgtcacgcaacatcagcgtggcctcctgcgattcataggatgcgtctggcgtctgtccacgcagaagggacaacgtcttacgggcggcgttgcgtcccatttccagcggattctgtcgaacggtggtcagattcgccgcctgtgcgatgtcggcatcatcgaaccctatgacggagatatcttcaggaacatgcaattgttgcttgccgagttccttgatgactgcgattgccacttgatcggtttcggcacagatggcggttggcatgtgtggcaatgacagtaatttcgccaccagttgcgcagcaaggtccgctttcgacaatggcgcatcatgctcgtccgcggttatgacgtaggcatactcatcgtcgtaaccgttttgttcagccgcttccaagaacgcttccgtacgctggctggtgttgtagaccatgtcgtcgggaatgtaatcaacgacgaaagcgatacgctggtgtccaagcgatttgagcagacgcaccgccttggacatgccatcgtagttgtcaacaccgatggctgcgtcgcagaacgattcggctggaatgttcacaccgaccgtcggcatatcggtgacacgcagtttctcacgtgcggattcgtcgagttggaacgacgaaatgatgatcgcgtcagcattgcgatttttaggcaattgtgcgaagtaacgctccgtctcctgtctgcctgtgacaaatgtgggcgacacgtcgtagccttccggttccaacacttcgtacacgccctgcaacacgttggcgttgaaccattcgttgagtttgccggaaaacagcaggacaacccgcatggttttcccggacgccaaagacgatgcgcttttagataaggtaaagcccaaccggtccgcagctgcctcaactttggcacgcgttttcggagcgaccttgccagcacctcgcaatgcccgcgaaaccgtcgcctgagatactcccgccagttccgctacttcggcgatggtggctcgtgccatattcactccagtttcccattgtttatccagcgctttcatattagcagaatcgttgatttcacaagcagacacgccataacaaaacaattattgcattcacagaatgaaagcgctatcattttaagcaatacgaagacgagaacgaagtgattccaatcgtcaaaacagagcgttctcaccagaatgaactagtgaaaacgcttccataaaaagctataacaaaatcacaatgcatccaatgagggaaggcaacccaatgagcaacgaagccaacgagcggcacatcgctgacgatccatcactctggtggaagcaggcggtcgtctatcaggtctacccgcgttcgttcaaagacacaaccgggtcgggcctcggagacatcgcaggagtcgcacaacaaatcccatatctaaaaagactcggcgtggacgccatctggctcagcccgttctatccgtctcaactggcagacggcggatacgatgtggacgactaccgcaacgtcgacccgaaactcggcaccatggacgacttcgaccatctcaccaaaaccgcacatgcggcaggcatcaaaatagtcgtcgacatcgtaccgaaccactcgtccaaccagcatgaatggttcaaggccgcgcttgccgcaggccccggctcaccggaacgagaccgttatattttccgtgacggcaaaggaccgaacggcgacgagccacccaccaactggattgccagcttcggtggatccgcttggactcgagtgcccgacggacaatggtatctgcacatgtttaccgtcgaacagcccgattggaattggaagaatccggacgtgcgcgccgatttcatcaagaccttgcacttctggctcgaccatggagcggacggcttccgcgtggatgtggcgcacggcctggctaaggatctcgaccgtgacgatctcgatgatttcaaaatcatcggaggcgagatgcattgcgccgacggcacgcatccgctgtatgacaggaacgaagtgcacgacatctatcgcgaatggcgcaaggtgttcaacgagtatgatccgccggcattcgccgtcgccgaagcctgggtacctccggagcatcaataccggtatgcttcgcccgaagaactcggccaagtgttcaacttcgaattcgccaagaaagactggattcgcaacgacatgcacctcgccatcgaagaaggcatcgccgctgcggaacgctccggctccacctccacatgggtaatgagcaaccacgacatcccccgccacgtcagccgctatgggctgccgcaggtgccggctgcagcccaccaccaacttgccaaggattggctgctgcgcaacggtacctcttaccatgaggatcgcgagctcggcacgaagcgtgcgcgtgcggccatcctgatggagctcgcgctaccaggttccgcttatatctaccagggtgaggagctcggcctgccagaggtcgccgacatcccgtgggacgagttggaggatccgaccgcgttcaaccgcgtccgagaccaaatcgaaaagggccgcgacggctgccgcgtcccgctgccttggaaggccgggacgccgaccttcggcttctcccccgccaccaagcatgaaggcgccggcgtggacgcgagccaggcgggcgatccgtgcgagaagccgcatcttccgcaaccgcaatggttcgccgactacgccgtagacagggaggacacggactccggctccatgctcaacctataccgcaaggcgctcggactgcgtcacgaatggatgacggccgacacgaccctgacctggctcgactgcgaccggtcctccggcaagccggacggcgccgaggggcacaccggcggcaccatcgccttccgtagggccaacggctgggccagcgtcaccaacttcggtgcggaaccggccgaactgccggcaggcgatatcctgctcgtctccggacccctcaccgacgacggccgtctgccgcaggacaccaccgcgtggatcgcgctcggctgaccggaccccatcaaccgcaattcgcattcaacaaccaaacaaaggagcacatcatgaaccgcaacatcacacgaatcgtcgccatcgcggcgacactcgccatgggaacatcgctggcggcctgcggcggcagcagcgccgattccagcaagggccacgtgtatttcatgaacaacaaggccgaggtcgtggaccagtacaaggaactggccagcatgtacaccaagaagaccggcgtgcaggtggacatccagaccggagccgccggcacgtatgacgccaccatgaaatccgaattggccaaggacaacgcaccaaccatgttcaacgtcgccggcttcgaccagttcgccaagtaccagaagtacgtcgaaccgctgcaggacaccgacgtgttcaaactgctcaacgataccggcaaggcttactcgtacaccatcgacggcaattcgtacaccctgccgtacgccgccgaatggtacggcatcatctacaacaagaagatcatcaaggattattgcgccaaaagttatgcggtgatcaagtccgccgatgacatcaaggactacaagaccttgaagcaggtggcagaatccatcgagcagcacaaggacggcctcggcgtcgacggcgcgttcgccaccccgggcttggatgcctccgacacgtaccgattcgctgcgcatatgacgcgtctgccgctctactacgagtatcgggacgcgaacaccacgttctcgaagaccatcaagggcacgtatctcaagaactacaaggacatgttcgacctgcagctcaagaccagcccaaccgaggcaagcatggtgagctccaagacctacgatgacgtgacctccgaattcgcgctcggccaggtggcgttctacccgaacggcgtgtgggcgtattcgcagatcaagggcaatgacgtggccgatgaggacctgggcatgctcccctactacatgggcatcaagggcgaggaggattgcggccccgtaggagtgtatgacgcgagctgggcggtgaacaagaacgcctccgaaaaggacaagaaggccacgctcgacttcatcaagtggatgatcaccgacaacgaagccaagaagatcctgtccaaggacatgggattctccgtgccattcaccacgttcaccgatgactaccagccggacaatcctctgaccgaggccgcccgagcctacagcaatgacggcaagaccgaagtgcgcagcttcaccattccggatcagcagtggcaagacgacatcgcctccgcgctggtcgaatacgcacagggcaccggcaagtgggacaaggtgcagagcgcgttcgtggacggctggtccaccgagtggaacaacaacgaggaatcgctgggttccgtgccggaagcgcagaagttcgacgcaaagagctgacgccatccgactcgtggaaaaacggctggacgccggtagataacaccccaatctaccggcgtccagccgttttttccgtgcaatggccgtccgatccgctgccgtacacttggtcgttatgaaagtttccctgcaacgcgtgaccgaagcgagcgccatcgtattgaacgagttgggcacaccggatccgacattcgacatggtgcagatcgggcccggattggtgttgaccgtcgaagtggagcccgatgatgatgagggaacgcttgcacggatggcgcatcgtgtgctcacgttacgctgtttcgatggtccgcagggcagactgtcgctgtctgttcaggagatgcacggcgagattctgtcgattccacagccactcaccatactgcggcgtcccgcggtcggcaggccgcagctggtatctcatgatgccgatgatgagcatgcgaatctgatatggattcgtttcaatgaagcgttgcagtcgggcgatgtccccgtgtgtgagggccggttcggcgcccgcatgcgcgtcggttccgtggcggacggtcccttccaattcacgttgcaggaatgaccgcaacgcttgccagcatggattccaaaacgttgatcaccctttcccgaagtataaatgcgatattacgaacgtagaagattccgctatacggaatgtgctcccgtatggcatgatctagtgtatagacaacagcatgacattcgcactacaattgcttgtagctgttacctgcatatgattaggagcaaccatgagcgacactgcgacgattagtttccgcactgatccagcgatcaaacgagaggcaagggaactgtatgccgacatgggcatggatctgtcgacggcgatcaacatctttctgcgccagtcaatccgtgaaaacggcatgcctttcaagatcaccagggacaatccgtccagcattgaggcacgccgccagacggaaacccatgacggagaatccttcaccagcacggatgcgttgatgaaggatctgctggatgcttaaatcggtctttcgtacaacgcaattcaaaaaggatttcaaggctctgcttaaaaagcattacaatcccgataagcttagacaggccatcgacacgctcatggcccaagacaaacagttgctcagcacaaaataccgcgaccatcagctgaccggaagctggaggggataccgcgaaatccacatcgagggtgactagctcgtcatttaccgtgtggagaagcaggagctgcaactcgtgctcacacggaccgggtcacatgatgatctgttctagcgattacccgattaccgactacttgaacaggtcgaacaggctgaacgtggtcttcttgtagatggtgttgtacagcttgcgcttgggatgcaaccaccccatgcccttcttgccatagccggggatcagcgcccgcttgaccgcacgggtggcacggcctttcgtacgcgcggacaggctcttcttccagctgggttttctcattccgtatttcatggcggtctcgtttcgaacggttatgctcattctatacagtgctgaacacgttgcagatcaagtaatcagaccagcagatcgtatacgctgcgcatggcgagcagtccgtctgtcatccattggtaggcgtccgtcatgtcgccggagaaatccacatcatgctgcaccaaaaggtggcggttcttcttgtccgcgtccggctcgtcccagctcaccgcgccaagatcagacagtattcgttcaacggaatccctcatggcgtagagtttcgcgtactggaacgtgtcggtgaaatacaggtcgaccgtaatatagccgcctcgaatattcaacgccccatccgggtggcagaaacccgatcccactccgaagctggtccatgtatcgctgttcgtcttgcgaccggatgggtagccgtatacagcaacaaagtcggctcgtgttgcggcatattcgtacaggccattccagaagctgcgccgcaacgagatattaccgctgacttgccgcagttcgtccagggttctgccgtccgcgactttccacactgtccaaccgttgatctgcttgtcctcgccggtttcgagcattctggcgcggcggaatgcgccggatgggctgccgaatatttcgccgttggacaggcggatgcggtggtcttcggttacggtcgccgtggcggttatgccggcataccggctttccagcgcggctccagctgcaagaatgccccgtttgcatagatcagcgaaatcaacggcattctgttcgcgttccccctggttcgcattccgattgcgcagagtctgcataacctcttcccccgctgtggggcgtgcccacacctgcaatgcgagatcggcaagccgggcacctcgctgtgcgatcgcctgctcatcccattgcgaagcatcgtgcagttccgcggagatggacaggtattcgctgtcatatccgccaatcatgcggcttttcttctgctcgaacgttccgtcggaaagttccgagttgtatgcggtcagtgtcagatttcccagactgttcaccagcagtgggaatcggtcggggtcggcgagcatgttgcgccattcggcatgcgccatggcgttctgcggcatgatgtgttcgatggtgtattcgctgaaggatcgcgaatccttgggatggttatgattctccaatccggcgagcagatatttgcagcgcggagccgggcggtacagatcctcgccgagcagcgcctgcctgaattgttcatccgtgggcatgcgcgtggctttggcggtttcggtgagcagcagcgcggcaaaggtttcggccaaatcatgttcggctgattcaagtttggctatcagagatgggacaagtttgttcaatccgttgctggacaccgagcagaccattctgcggaacagatacgattcaagatccgcgagcatgcgcagcaatccgtcgcggtttgtgcgatggtgcttccacgcagcgaacatgtacataaccaatggatccgtaaccgtgctgtccaggtcttgaatcgattcgagccgatagtccacgttagtgtcaccgctgccggcggccgcaacgcctttgataatggcgtagtacccggcatattccagcatgttctcgagaagattgcgtgtgagttccatgcgcggcatggagctatcggctgcaaaacgtttgaactccgaatacatggcgcggcctttgggcacgggctttttcagcgtgacgaccatccaatcatgcaggaacgcatcgaatgagagattgccgagagtacgctccataggcagccagtaatcggcatacaaggtgttctgctcgaccatggggcatcccatgagcatgtaattgcgaaccaggtcggaagtctcaagatcaagcccagtggaattcatcgattcgaataccaactgaggttcatcacgcccctgatccagggtgacggacacgacttcaaggcgctgcagaccgttccataccacgttcgcatcgtcgatggccgcgaccagcgaacggaataaatcaagattcgcttccaaccgggaacccgtatcggtatggctcgggcgatcgggggcgaccacatggtcgcacatgctgcgcagcacttccctatcatcaccggaaagcgtcagcttgtaccggccttcgccggttgcgtacttatcgacaagatacccacggtcgatgagcatgtctgcggagaatcgcaggttctcagggtgttcgcaggcgtattcggcaagtgcgatgagtagcagggtcacggaggtaaggcgctgctggccgtcgatgagctggcatcggctgacaccatccggaccgatgccaccttcctgcatccatatgatcgatccggtgaaatgcgttctctcaggatgcctgccagccgttacgatgtcggcccacaattgctggcactgtgcttcgccccatgagtatctgcgctgatacaccggaaccacgaaccgaagcgaaccggtaaataaatccagcaggattttcttgccagcgtccatggtgctcctcttcccttacctcacatgcgccgagacgccagttagcagcacacccttttttgcacgtgtcatggctacgtaaatgaggcttcgttcctccctgtagatttcgttcaacgcagccggatcggcaccggcagattgcagcgcgggcttcggcgggcatacaccatcgttcacgtcgactaccaccacatagtcgaattccagtcctttgactcgatgcatggtggcgacgcgaattccttgcctttgcctgttttctgcatccctaccaagctggtacacgccatacggcaagccgtcatcaagcgtcttagaccactggtcgatgcagtagcggcttctcgccgccacgcatacgttacgcggatcgacacgctcgccatcggactcgtcgccgaccgtatcttccgccggaccacataattcataaatccattccctgacggcatccatttcatccgcttgagaggcgaatcgccgcgtttcaggaacgggaccgctcatcagcgaccggctgtcgccggtcgggctctcccctccgtccaggtcatcgaacgttgtggccggcgaagcatctccgatgccgcgaacagccgcaaacaccgaatccgcgacatcggcgccggaactacggaaaatggagtcggcggcgctacgaatctgttcggtggtgcgataattgatccgcagtttgcgggcacgtccctggatacggatgccgcatttcgacagcaccgcagtatgaccgtagatgcgctgctgtgcgtcgccgacgataaagatatcgttgtctccctcatccaccagagcacgaatcacacggtatgccggcacagagaaatcctgcccttcatcgaccaccacatgcgcatatttcctcggcgcatcaccctgcgtaagcaacgacacgacgttctgcatggctgtgtccacatcatatgcgtcgttcgcctgcatgatgcgccgatacgtttccacaactttccatacgacaagcttctgggctcggttcagtctcgtgccacgccccttgcgtagcacgcgcatgtaatcggcagcattccgtacctgctgcggcacaatcacttggctgagctcacttttgaagaaagaaaccgtgagtttcggatcgttcacgccgatggacgcgatagccttacgccacgcggtgtcaagatcgttgccatagtcggagataccgtcataccaaatctcaccggaatagccatgccccgtcagcagatcttttacgagcttgtcgagattgaccacgtcgatggtattgaattcgtctggcgtgcagatgagtttcaggttcgatgcaatatcggtggcaagattacgcgagtatgtggtgaacagcactttctgacggctaccgcttctcagcagtcttgcagcgagacgtttcgcgcgatgcatggccaccacggtctttcccgtaccggcaccgccgagcaggcggaacggaccatggtaatcatgttccacataaagacgctgcgatggatgcaggaacacacgccactgttccagcggcgcatccagaatacgtttgagatccgcttctccctgcacgaccacgaaagactgctgcgatgcatagcttgacagggcggcacggaagtcctccggatcggcctcttcaccagattcgatggacgaggcagacatctgctgctccagccccagcctgtcgctggtcttgccttcggtttcatcgagcagtccgaagacctcggacttgggaagtccttcagcaacgaaggtaaggtacatgaaagcatcctttgggagcctggccccccaccgttcaaacgcttcccacgtctttctcgtgcacatgactggcacatacatgtcaggtacgccgaaccggcgcatgtcattatctgtcaatgcccgataagtgtctggaagcggaccggtatgaggttcgggagcttgctgtggcatctgcggcgtcttgtccgtcacagctgaagttgcaatagctgaagctattccgtgattcgtgccggcatggtcttccgtgggctggggaacagattccgacgcagcggaatctgattggggcgcgtttgcggcaacgctcccccatccaactttgttttgggaatcctcatgcatcgctgcgtcgatttcctcttgaggagccatatcgtacagctggatggccctcgtattcgggttgacgctgattcgctttgtttccgcccatttgtaagcgtcatcgtggtctccaacgtacagcaaaacgtacacgttgctgcttttctggaaagcgatgatggcgcgatatcgctggtcgatgcgcgcggaatacagtttttcgtccgccgcattggcgattcgttccagattgattccggatgatcgaggattcgcctggaattttgtcagaaacgtcgtggcatgtttctgcgctttcttaggcagctcgagcaggctgcgcatgagatcgctgccgagtgcgaccacgggtttgttcatcgtacgtatatctgccatcagcgttccatgccttccgtcaatgaagcgaacaccttgtcaaggtcatcgttgttttccgtaatgatagtccagccgcgcttgacgaattcgtcggcgttctctcggtcggattgcaagtcgtaggacgggaaaaacacgatcttcccatcctcccatgcgagctctgactgcgcaatgatttcctcgttctcgtccagcagctcatatccgagtgcatccggtgccggtatgtcagactcaataaaccgtttgacgacctccttggtttcatccgcgcaatacacgtaggtcggatccgccagaatatcgttccattcggaatcattgtctttctgcagatcaggagcgttccgcaggccgttgcgaagcggctcgtacatggattcgtcacgtagcgcagcatcaccgatagcatggaagtattccgagaattgcatcacgttcgcaaaatgccagaaggctgcccactgcgttttgaacgcctctgcctcgttctcgtccaaagcatccaacggattataatcatcgttctttgctttcgcggcatcacgttgaatgtccgagaacaccatgccgacgtggggttcggtggtccgcatatcctctccaatgcacaaaccggattggaatttcagtctcgtgcagttcgaaggattccaggacgagcaaatcatgaatgtcgattcgctctcgccgtgcaacgcttcattccgatgcagcatatccacggcctgaggttcaacgttcttgtttcgcggattcagagcatagctcattgccagcgcttggatggcgaatatccgttcggcatccggttccgcgagataatattccagcatggccattgccgaaacttcgctggggttgaattcgtcagtcctcttgcaaatcgtgctcttgtaagccaccggagacggcatggacttgggtgccagcatcggatcggcgagctgcgccacatccttgccctgcacatatccgatcacatcgtcataatccaaggaccatatgcgatagcctgcctgacgaagcgcttccctcttcagggaatcctgggcgacgatgcctgcatggtattgcaggccatcggtgaagatggcaaccggcttccttccgtcatgctcaaccacgtcaccagattcatcgatattgctgaccgtcagcacgaaatcaggcttgcagggaatcgcgaccccatcggccggccccaacgcgacttgtggctcgacgctccacacgcttccgttcacggtgatggaatatccaggtttgctattgatgaattcgtccttgacgatggcacgacgtcccttggcatcgtcggattccgcgaagggatgggcatgcatgcaccggagagcttcgatgaactgctgttcgagtccactgtcgaacagtttgttcgtgttgatcttcgaaacggttgtcacacgactgcgtttgttggccgggtcgaggatgcccgtgagcatcgccagcgcggtcttacgggaaataagtttcaggtcctggctttgtctgtatgcatacaggcatctgtagcacccgtcgccgccgttctttgcacattcgcaatgctccatgacttcctttgccctggaaaacacctcgaacatcgtatccggatcggacagctgcttaagatagccagttcctccgggcactgtgtcatatagagcaagataggttttgcgcagttcggagttatccggcaacggctcgttcatgagtgtcgcctgtagatgttccacgttgccgaagcgttcacgcagcccaagcatcactgcggcggtcaacgactccgcagcaccgtccgcaccttgggcatcggcaagccctggcacgagcatacgtagcacttccgatttgacctcacggtataggaacaggcacgtgccgttccgctccgattgctccaactgctgttcctgcgccttcttgcgttccggacagaagtaggcgtgccgtgattcgcgctcgccgagcaacgcgccgcatttcaggcacacgttgaaaccgttacgtatctccttgctaccggcgatttccaccgaggctcccctatcagaaacctgtccgaagttgatttcacggactgtaccctgcggcgtgtaatcgaatccgaagttcgtgattcccttgaactgccatcccgattggatgtccgccggatcgatgtccaccatcgtattcttcaggaactgagtcttgggtctgctgtcggaggtgtcctcaatcaggctttcgctgtaggtctcatcggatatgacggtgtcgatgcgcagcatcggccttttctggccgttatcggcccactgcattgacccacaggagggacagctggcgaggttctcggtgctggaggcgggttccgcgtgcgaacagttcgggcataggcgccacattgccagttcgtcgtcggcaccgcctttcgaacatagcacgcggctgattttgtatttgcgtccgcccgcgaagaacgtgtttcccggcgccagttccgtgatggccgtggccgccgggcgcacgaaatcacgcgtggccttccccctgcgtttcgtcttgtcctgcgcggcaggctcgattccgtgtgccgcatcggacggttccttgtcctctttgaggatggtgtggagggtcacaccggtttccgggaacgcataattgggcaggatgccttcgtcggaaaggtagttgaacgtgttggtgttgagaatgcttgtgacgatgcggccaagattgtgaatctcatcttcgcattcgcgctgctgctcttcgaacgatgagtcggagggcttcttcttgagctcgtcgagcagctgcctcgcagcgctcttctgcgattccagcgttctgacggtatcgttggttttttggaacacatcgtagacgcgtctggccatggtgctgccatcttccgtaccgcgtacgaatccgtcgagctgcgttcggagttcctcggagaatgagaacattcttccgaatccgtcgagcagttcgccggaatgttggcctgtccagttcaggaaattcaccgggaacccgctggagccgctgccgttgacattatccaaacagtttttcaatttgtcgggtaccacatcggccggttcgctgccggcatccagcatggcatgcacccaacgatccaatgcgtaggcggtgagctgacgctccaacactgcggtcgcgtcgaggaagatgtgcggcgggttcaccgcgcctccaagcatatctttcggacgctggtagaagtacgtgtcgtgttccttggtattggccaccgccagcaccaaggagttgccgtcacgtcgccctgcacgaccggcacgttggatgtactgggcttgggtaggcggaattgacgagagaatcactgtggagaggtctccgatatcgatgcccatctccagggtcggcgtacaggcgagcacgttcacgtcgccgggcttgcggttcttgcgcttgaattcctcttcgaccttggcacggtcatcgccattgagcagccccgtgtgttcggcagcgtggatgcgatcggctggctccccgcagtacagcttgccatagtagcgcaattccagggcttcggcttcgggagtgccggagaccagtctgcccgggcatttgcggatacggcaacgtgctccgttccacgcgtcaaggttctgcgtagcgcacgaatagctccgtccacacgtgtcgcagatcaactgcgttaccttgccactgaccatgcagccggactcgttgagcccgtacacggtgcgttccattttcatgcttggataacgttgctgcgtgatgaatcctgctgctatgcactcttcgagcacgattcccaacagctcgtggtggatgtcgccttcaagggcgccgtcggtgaggtaccggtcgacgatctgacggtatgccggcgaattcagggtattgaaaacgcctttgcgcactggctccttgtccgacaggaaatagggcataccatccgcgtacatgccgggcatccatttgatgttcgtgttggaaagcaggaacttgttgccgtcgttttgcaggaactggtcataggtcacgtcgaaaaacgcgcctttcgtgcgcagctggtcgaggaacgccataatcagtcggagccagtcagtctccatgatggaattctcgtgcaatccgatctcgttatggcaacgttcggcaacggtctgtgccacacgtttcaggagaatctggtcgaatgctattgcggcgcagccggatttctccaacgtacgtccggtacgggagcgcatgccgaattccagcagcgattccagtcggagtctgcgctcgatccaatcgagcagctgacgccggccgggccctgcgggattgccttgcaatacggcttcgtattcgcgcatccatgtcatgttcggcgcgatgaatcgcacgatgtattcgttgtcgtccggatagcggcgatggtagtagtcgttctggctgttgagatattcggcgagggaaacgccgtccttgtgttcctcgcgcatgtagtccatggcggagttgcgcagggcgaatcgccaggtgcgggagttgaacacgctggctcggtaggaggcgtcctgcacactgtcggagaacacgatggccttgctatcgtcgttgaaggagtctccggaaagttgggtgagcatcacactgacctgcgtggtggttctcacaccgaccatggcaatgtcctgttcgctgccgcagaacggacactgatagtgtttgcggttgccggatacaagctccatgcccctagcgaccatgggtatgcgctgctctccacaggccgggcattcacgttccgtggattcgaaatgttctacggcctgttccttcatgcatgcattgcagaaccagaccatggctccgttgtcggcatgcgggtcaagaacataatccatggtgcagggttgcaaagtcgccaacgcattgtcggcatggtaggcgaaatactcgttgtagaacgttcgtgggtcacccatgctgataccgccgtctttgccggcaagcccaatccatgcggtccctccgcaatcacggcagttaatcaccggcatgcgggtcttgaggtcgtctttggacagttcgacgaccggacggtagtcgatgctcccttcctgcggggtgatgttggcaaccacgcggccaagttccttgacccatagttgcacctgtacattcaggaacggacgtgtgtgcccctccgaaccgttgcgagcgcgggagacgagcgctatcagcgcgtctacacaggccttctgctggcgtgggtgcaaggcgttgaaccttgcatccatgatggcgagcctgtccagcagtttgcgatcgattcgctgaggttcgtcgcagataagcgaggacaggctggccaggaaccttgaatgacgcagggattcggcgagccggatgcgtgccttgtccgcggagaccggctctgtgggggcgtcgtcaagccacgcttgggccgcataggcaaggtatttaccggggtcgacgtcctcttcgagttcgatgagccgatcggcctgcgcggcagtaggcatggtgtcgttatagtcgctggtgacgaagaattcgtcaacgcgaagacgatcctcagtcaccacggattccggcgtgaacgtggtgttgaagatttggctggcatactcacagacgtcacgtactgtctcttcggtgcccatggtggccgacgtgccaacgaagcacatatcgtcgctggtggtgttcagcctgtcggtgagcctgcgcagcaggcaggccaagtcggtgccctgcgcgccgtcgaaagtatgcaattcgtccacgacgaagtatttgagcgtgtccggatcgttgctgtcccaaatccgggaatctttggggcgcaccagcaggtagtcgagcatcttgtagttggtgagcaggatgtccggcgggtttttgagcagctcatcgtggctggtcacgatgttggtggcggtcatggcgtggttgtccttgtcgctgccgccttggctcatctggcccacatacatgcccgcggtcacgttgttgcgcagttccggactgttgtggatgagttctgccagtcgcttcgcctggtcggtggcgagggcgttcatcggatagacgaggatggctttgatgcccttgagtccgagcctgcgctgccgataacagtagtcgaggattgggtacaggaagcattcggtcttgcctgagccggtgccggtggccaccagtgtggattcaccggcggagatgcgttcgaatgcgcgcatctggtgcgcatatggccggtacgtggggtgcaggcatgggaacgggaattccgcatgtttgccgaccacacgaaacggcagtttgaccgatacgaacggctcctgggaaagcatgccctcctgatgggcgagtttgcggatggagccgcggaacggcatattggtcatggggaacgtagtctccacgtaatcggcgagtccagactggatatgccgtgcaagcaccatgggaatcatttggcatctccgtacttctgcgtgaagaacttccacgcggttttgtaatcctctacgcgatcgcatttgtcgaacggcgccacgtattcgatggttcgctcacgtggcccacccggctgggtgtcgtccatgatggtgcgggtgaacactttgcccgcaggcgcattcttgatcttctcgaaatcaggacgtttgaaagtcagatcaccatagttcttcttggagaacacgatacgaccattcgcgtcgtaccaagtgtcatcctcgtagccactcagcacggtgaaggtcaggcggtagatgtcgatgagctcgttcagggtaataccgagcgccatggatgccagcacgtccagttccaccaatgcctgccggcgttcatagtccgtgcgtaatggcgtatgccattcccattcgcctgtcaatgaggtgaacgtatcggtggtaagtcgaggatcattcttcgcccagctcatagacgtgtatgactcgtcccaacaggattgccacaaatccgcatacggcttggtcagacagttgagcagtagacctcggagacggatttcgggagcgaggacgctttccggaactgggaaaagctgcagcgttgagctatgaatatccattttgccgatagagcgtacgagaaaatcgtacggcagggcggcttcaaggccgctcatgagcgcgagcaacgcgtagcgctctgggtgcacaccataacctgttatggtgtgcacccaggctgcgcctgggtgaacacaggacgcttgcagcgtcctttcactaactaaattaaccatacgacggcatgcgaggcgataaacagcatcgaaattgcttccgtcagacattttcgggagtctctgctggtactcaaaatcggtacaagcttgtctgtatttcgttctcggctcaaacgaatcatttacctccatcaaatcaagcaaatcatagtcattcctcgtcttccaatttctttttgcaccttgcataatggggttggcgacgccaaggaatggactggaataaattattttttcatcgacactgggaaaatgaacttcgtcacatatcgtaccgtctttacgtgcgttagtttcattccacatgctcgaataagttatgtcttccccataatcacgtaagcaacgagatacacttgccattttacaaattgcatcaaaaagctcttgcgcatgcacagcaacaagcggggtgtttctccacgaacttgtcccctgttcacttagcaacaatgcaaaagttttaagctcggattcctcaatgtggataatacgattcttgtggccttttacctcccaattccaattatcatctttagttcccggtacgtccccactaccatcagatgcatagcattcatcgatagtggacggcgcatacaaattccaaatcgaatcaaatgaaatgcttgaattaattttatttctatagatattgagactgaactgtgcattgctatccacgcccgcaaacaaattaagtctattctgaaaatggaaatggctacatatcctacgatacatttctcttctaagaagtggagccttcgtgtccgcataaacctcatctggatggacaaatgcgcttacgccattctgcgcacgcgtatagctccaagcattcggcaggaaacagcggaacaaattggttcgtccctgtagtagcgggtaattccccgctgaaccatagaatgccaaagcaccggcaatattcacatactcccgaagatacatagttcgtatacgtgagttctttagaagttcacccatacgcttactcaaatcggaagccgtaagcttatgaatcgcaaaataaggattcgcatcggaaacggcatccgtctcactccactgcacgttcacccacggcggattaccaaccatgaagtcgaagccgccgtctttgaacacgtcggcgaattcgagctcccagtggaagaaccgctgcttcttggcgacttccttcaccaagcgaagcctttgcgcaggttccccgtcacctctgcaaagctcgtcgagatccacggtatggtcatacatgtagtcgcgttcatgactatcatccatggtgtccataagcgtgggctgatcgttatccatcgacatcagcgtgaatccctcttcctgtggaacctcgccggtaagaatcagcgacatttctgtgaggtactgcgatcttgtgggaagcaggtccgcttggtcgatgggccagaaccacagcgagcaccagtagtccatggcaagtttcaagcgagcgtattcgctggcgttctcggccttttccgaatggtaggcaatgcggagcatctcatccttttcacggatggtgaggttgttgccacggaagtattcgctttcgaagccaagcgagccctgcccatatttctgctggttttccaaagccttcgcagtcttcttggaggcgttcgcgtcaaacccgtagataatcagatcgtcttgagtcgccttttccaattgccgacgtgccttgatctggccgcgccatagttcgtcgacggtctttgacaacgccctcatcaggccaatctccgtttgggaatagggcttcttggcgaatctcttcttccaggccttgatggtttccagatgttcggattctatgcttttgatggtcttgtcgtcatacttgcacatgtccggatctccggtcaggaactggtagatgcgcttgatagatgacgaactctggttgaacccgatatgcttgggctcgacctcataccagtggcggttcttggttttgctggacaagtccgactccaagtatccaacgcggcggccgccaatcagcgaattgccgcattgcagctgggttccgaaccatggcacgaaggatccttcgcaaatggtgttgagccatagggacacttcccccaattccactgcaacggggttcaggtcgatgccgtagatgttgtggtcggcgatgtacatcttgaccttctgcagttcagcttgcctgcgttccgcgggaatggccgccttctgtccttcctcggcaacccgctccttctccctgcggttcagatacatggtggccagctggttgatggtctcgttcaggaaggtcgcggagcccatagccggctcgcagatcttcagactcagaatatcggtggcttgatggatacgtggctcaatctccttgagcgcatacttcaccaggcattgcgcaagactgtccggcgtatagaaggaggccgacgtttcacgttcccggcctgcaagccggtagatgaacgtaccgggctcgtaggtgcgcagctcgccggcatgcgggcttttgtccgggtagcgaacgcgttcgctctccgaatagttgacgagttcgcgttccggcacgaagtagccgactttcaaagggtcgtaggaatccttggctcgtttgacctcatagagcctctctttggcgataaaaccacggtaggacagcaatgcctcatacacggcacccatctggctgatgccaagggccgcgtaagagatgcgctgcctgcgtttgactcctttacccgtcttggtgacgctcatcaggtctatgatgcgcagcatcacgctgtcgcggagtgcggcatgttcaatcagcgcggtccgctccggatcgaaaatgtgtgccttgagcggcggaaccataaacaccgcattgatggcttcctcgccagccaaccccttgaaatcctcatccgtcttcgggtaaccgttgaacaccagatcgtcgagtcgacgcaaggtgtccgctagataggtggaatcgccagcctcatccatgcggccacgcatctgttccgcaatatctcgcaagctgtccagcgaatagccggtacggtagatgtcggatttcatcggcgcatagccgagcgacggctttgcttcaatgaacaggaggaacagcagacggtacatgtatcgcaacgcctgcactgtcaggtcgcccgcgtcgatttcgtcgatgctccgccccttgttgcaggtccagtcgtggatgacctcgttgccaagtatctccacgcattcacgtaacgcggaacgcagattgtcagacacctcaaccgcgttcttcgcagacgtgtcatcaaacgtgtcaagcagactgtcacctttgttcgggcagagactatcacgacgtaacagcacagccatcgccgtatacacatgatcctgatgccggctgaagatctcgtccaggtcaaacagcatgcatttcttgtcattccatttacagcggtcgatcaacgctatctgatgcaaccccatgagaagaatccaccgtgccggctcgtcgaaatcggcaagcagcatacgtgcatattcctcacaggaggtgtcgtccttgccagagccgtcttcgatggggctttccagaacgcctgcctccgcattatcggacaggctcatcagaacttgcaagcgcggagccccatcggaatcattgacctgatagtagacaggaacagacttccctgaaatccggtcgggcaatccctcgtctttggcttgattcccctcctgcgtatagccgagtgcggcgagcatgccgtcgatgaaaatccgtacccgttcagctggaaacagatcgttctcgttgttgttgatgacttcggtgaacgactggcgcatgtccttcagcagtcgcgctgggcgtttctcaggaggaagctgtttccaaggtgcggaggcattcttcacttcatccgggaagtattccttcatgtagtacggcgtgtagaagtcgttgaccgcctcgatgcccgggaatgtctcgttcagttccttcgccatggtctccccctctattccttacctacgaatgcggccgcaatgcggatcaccggctcaccggaagcgtccaatgtgtcctgaacccagtcggcatattgttcgagcatccgatcaacctgttttgtgttttccttggtgtttttgccttgggattgcaacagtgccttgcgtgtatgggaccaatgctcgatgcggtccatttgctgagtcacttcttcatctgcctgcgcacgatattgttcaccgcaatcgctgagcatgctcttgccgcgcgataccgcatcctccaacagcagttgtgccgcatctatctgttcggagctggccgcggaatcctctcgattcacataacgacgttcagtggttcccggaatcaagttcccacgatatccggtgatacgccacacttcctcaagtggcagtatgcccatgcattcgccatcgagataccgtacaccgaaccattcatcgatcaccggggatgcatgcctgttggcgaccatgccgttcatcagcataatcgtctcatccgcatgcaggtttccgttggtcacgccaataatcggggcctcgtcacgttggtacagcagtgaggaagccttcaacccgacccattccgtgattggattcaattcccacaggtattggacccgactccatgactcgtcgttgatacgggccagcagaccgttggcttggtcttcgcagtatttcgcgtcatcactccattcagcgatgttgtctcgcaacacctgcgtgttcggcacacgtctgcgcagccacgcgtgcaacgggctatccccttggaactccaccgcgaatccatgagcatcacgcaactgacgtttcgatttaagaccagccgactgccggaactcctcgcaggagagcccctcatccacatactcgtaatccgacatcagcgtagaggaatcggctatgccgccatcgtcggcgctcccagccgtgctctcccctgcggactcgttttcctcagtgctcgtagtatcggaaccatccggcgtagtgaggttgaaaaaactcaatggatcgaaaacatcgtcatccgccacagtctcaacgtctccggaacgttcgtccgaatgatcgatgtcctcatcaggaatacaaagtctagctgcgaaattctccgctgattcgccggattcaatcgcttcgcgggtaaaatcttcctcctgatcgacgtcgaatttgcccatgagcaaggacggatcgccgatatccttacgtgcctggtcttccttctgctgcaggatctcgagaatatgcgtgtcaccttgaatctttgcgttacgcgagttaatcatcatgaaacgaatatcaggctgtttgcgctgcccgtaacggtcgatgcgtccgttacgctgctggaacaccatcaacgaccatggagtgtcgaaatggatgagtctgtggctcagatagtgcagattcagaccttcagaggccacgtcagaggccacaagaatgcgtataggcgaggacttcgtaccgaaatcctcgacgattttctgctgttccacatcgctcatgccgccatccatggagacgatggccttcttcggtagtttgagatcctgccgcaagtgctcctcgagatagttcttcgtctcgatgcgttccgtgaaaatcacgatacggtcatcggcgtcttcgccgttatgccaaccgtaatcggcgctgcgcagaagctgcagcagtctctggtaccgggagaactgcatcggaccgattttctctaaagcggccttgagcccttcaagcctgtcgatgtctccggtctggtcggacgcatcttttttggcaagccgcttcactcgctcgtcgatggtcttgatgcacgctgccggcgatgaaaacagactcttctcaagcatcgtcttgaacaggaaggaattgcttctcttctgatgcatatccatgacgagtttcatattggtcaagtaatcgaacgcctcttcctcggctgcggtggccatgcatttctcctgcgtcaccttgcgctccgggaagctgcctgacacctcggccatcacgtccttcttgaaacggcggacgtacaggtgttcgacatccttcttgtcgtaccgctccggatcgggcagagtggttgggtcgagcatgttcatcaacgaagcgaaactacgagcgcggccgtcatgaggcgtggcggacagcataatcaacgtgtcagagcgtgaggcaagtcgcttggcaagcttggcacgttgcgcgctacggccgttgacggcacggtcggcgacattctgggcctcatcaatcacgatgatgtcccaatacgaggcatcaagcgccgcgccatattggatgtcccgtttcaacgtatcaatggagatgatcaccttgtcgtagtaggagaacgggttggcgttcgcgggaatctcggaacgaatctgctggatacgcgaggaatccagactaatcagcgggatggtgaaccgttcccacatctccttctggaactggaccatcatgcttttcgctgttaccacgagaatacggcgacctttgtgacgtttgatgagctccgccatcaggattccggcttccaaggtcttgccaaggccgacggcgtcagcgatgagaattcgctgacgaggttgggcgagcgccttcttcgccggaacgagctggtacggcagggagtccatggcagccttgttgccgacatgaatcctcgcatcggtcggcgcagtggcacgtaacagactctcgatgaacagatgcgacttcgcagctcttgccgaggtgtcgggaatgaagcgggtcttcaccggatcgacaggcgtaattgtgtccaaatcatcaaggaacgtggccgtcatgtcccgcaccagagcggagataccggtgcatgaaacggcatggttgccaagactgttcggctcgactttatcgacaagccactcctggccgcggatcagcactctcatgccgggagaaagcagttctcgttccgaatgtgcgccatgcctcattgccgtgtgctccccatatgctctcaatcccaatgttttcgcatatattgtatgtcattaggggttgaaaccttctgctttcccgcatgaatgttagatacacgtatgttttcgtgcattgatacttggaatcatctacatctttcgattatcacttcccgaatccttacctccccatcgcagcttaatgcaacaaatgcggatgccgaacaaatctaccggcagaagagagtaaatcatttaatatagctacactggtacaacatgaccgagaagagcaatgcagcagctgaaagtgaaataccagagctcaagcctctatacccccaatatgacgaatcgagccactcaccctatgtgaagaggcttgaaaaggcgttgcagggcgaggatacgaagatacacaacatagctctatcaggcgtctacggttccgggaaaagcagcattcttgagaaagtcgttaaagaccttgaggaagagcgccctcatacaactaggacaatctcactggcgcctttagctgcacagcttaaggaacaggatgataagaaaaacgattccgtctcggataaggataagtccacttcgaaagaaccatccggcgctcccccaaagtcttccaacaattcatccataaccaatctcattcaaaaagagatcattaagcaacttctatatggaacagaccccgaaaagattccggcatcacatttccataagatgaacgaaatcggattaggaaagcagatactttcctctcttgctttcggcatgctgttactgttcattcttaatatctatcaatggccttacagctatattcaaaaaccgttgacatggctaccaatcccaacaagcattaccaaaattcttgctgaaatcgtcataatttgcctgctatcagttcgcactatttcattatttcggaacccgcatccatctagccaaaatagatgtcggaacagcaggcattaccctgggagagaactcggactcttatttcgatcagtatcttgatgagatcatatatatctttgaaaagacaggcattcgaactgtattttttgaagatcttgaccgttttcaagatgctcaaatctttgattcactacgcgagctgaatcagatcctcaataatgatccaaagctgcaacacacagaatcaacaatccagaaaatcagtcaacgattgcatttctctcattccgcaaaagaaaagaattctcagtccagtacacctatacagttcgtatacgctattcacgatgcgatattcagtaatcaatatgtttcagctgacgcacaaatagccaatcaagaatctttggctcattccttctcctgtgcaaagttctttgacatcatcattccagtggtgccattcgtatcggcaagtaactcataccaaatcgcactagaaacattggaagatgttcttgatgcgaatgacccccaaatgattaaccttcttgaactcgttgcagatgcagttcccgataaacgcacctggatcaatattcgcaatgagttcattgtttataaagagcagctgcttaacccgaaaaggaccaatcttggactgtcccctgtcaagatgctcgcaatccttatatacaagaactgttaccttgatgatgccataaagttacagaacggccggagcaggcttgaccacatctataaggaaataagagagataatacaggaagatatttccgcattagattacaaaaacaaaaatctaaaatataaaatcaacgaaatctcaaatggcagagccgctgaagaatacgctagcgagcttcgaacggaccttatctatctgcttgccgatttgaataatcagcaagcagatagatgccaatcaattaatataaatattccaagcaacagtcaaaatacatatgctgccgacgatccgaaactctgggacgacatttctcgctgtaaagaaaccaatcgaatcaacattcgaattacttttctcaatagttactatgataatccatcatttgatttcagctccacaataaagacttttaaaaagatcatgggtaaatcactagacaccgactggcgaaaagataaagaaaaaaacttatagatgagaagaataatacatcactgacgatcgaaaaacttcggtcaggagactgggaatttattacccactatgaagcggcgaaaccatgtcacaatcaagaactttatgctttactaggtggagacaattctctgctgaaccgactcatctcacacggatggatcggccaggactatatgctctattccacgatatatacagatgaaggagtaacccggaacgcgctgaactttattctccatcatatcgatggcaacaatcctgactatcaattcaaacttgacgatgaggactccgaagacgtcctccgtcgaatcaaaaatcgagacaaaacgattttcagccagcggagaatactgaacattgatctgctgcattacatgctgtcgcagaataaagattctgaagtagtccaggatactaatcaaatcatcgagatgctatccccattggacaacgagacctctgaattcgtttcagcatatctggaccgtcttgacgataaagctaactcattgctcgacaagatggcaagccgcagccaaaagttacttagcttcctagctcaacgaggaacaacaggcactgacatgctttgccagcattttgatgtggcgttccatcatctatcaagagaaatccaatacaccgtagacggtaacctggctgattttcttcagaaccattggcgaagcatctcaatcttcagggattccaatatcgctccggcactcgttgaacctatagtccagattctcaacgatgggaaagtcagaatagactccctctccaagctgggttataaggattcaagttctggattgcgatacccctgcgtggaacagaacctatacgtattttcaagaggtaatcttgaaaccgcgttggacaccataagccaatcagataacaatcaggatggttcatatagcgtctgcaatagacttcctgcgctcaacatgattatgcatatcagcagaacagtgtatgcgaatgcgcttgggcaccttgagaaatattttgatcttctgaccaaagatgaatatgcattggattgttcttccaatcagaatatcgccgatgacctgctccacatccttgacgatattcgtcaacaagccaatgaagaagaggatacagaaaagcttatccttacgctgctgaataggtgctcgtcatctgcccgtcttcccctttttgatgatcgttttgagaattataccgatgcactcatggaatgcgatgcagttcatttcactccgacgaacctacagtgggctttcacccatgacgcgctcaccgaacatgaatcctcaatgaccacgtggatccaaaaacatgactctttcgaacagggcgatacagacgataaacttgataaagaaaaactcgctgaagatacaatcaatcttccacccaccattctgaaaagcgataagaaaatacagcttctccaagaactcgaactcgacagtcctatccccgcctcatccatcgagctggatcatcaagaccttgagcattaccctgagatatatgctcagctcctcaagaatggccttgttgccgacatggcagaatcctttgaatccttagagggacaaccctggcccgtgcgggaagcttggatcaaggaatcgcagaaattcggcgactatcttggtgatgtaaagctccaccccaatgaggcgtgccatatcgtctgcgctgaggatccacaattacagagattcgcaggaattattatggacaatttccgcgactacacggaaggagccaacgagacagagcttctcaatgcatccgctgcgctaatcaggaaaggaaagaacatcgacgaagcaacacgtcaggatcttgccgaacatgacgatggattagacaatacccgttcccttctcgatgccgaacatgacgatggattagacaatacccgttcccctctcgatgccgaacatgaacgtcagtcagcaatcgccatgtttgccgatgctcttgaatatgcagttacgcatggacagaccgaaaacgacattgttagaaatatgaagcaaattttccaaaaacttggagacgaatatctgaaattcattaaccctaatagcaaatgcatcaaccttccaaacactatagaaaatcgacaaatcatcaagaccctacgcaattggaagccggaactcatatcgcagactgaagaaatcaatgagggagattcaatcaaaattaaacgagaccagaagctctggaatggattcttcaagcagggtgaataatcttgcaacccttagcgtataacgaagatggatggtgggttgggtggttagcagataaatcatctgttaaccacccaacccaccactttcagtcgtctatctcaatcgcatgaatcgtgacttcgtcattttccaaggcattggccttcttgaattccgggcgtagttccataccatcctggtcgaactcaccgttcaagttgcgtaccagcgtatcggccaatcggccacccatgggtttgaacgtcgcataggttatcgccccggaaatggcgccgccgacaacgggcacaaccttggcaacggccttcccgaccgattccttcaccacctgtttgccgaccagtgcgccgattttcttgagcagtggataccaggccgttttcatcagagcctgctgagcgaccttcttgcccatattcttgccgacttccctggcgacttttcctatcagcatcgccgcacccgacgcaccgaacattacgcccaaatagacgagaatgcgcactttagcatcttcgctcagctccgactcgtcggataacagatcatcctcaccaaaaagataggcgattttctgcgccaggttgatcgcaacaccaaaatattgagccacgtcagcgcttccggctgcaacagccatagggccgccagggattcctgccacgaaggcggcgagagtggtctgattcgtcgacttcttaatcaccccatccgcttttcttcgcaacgactccgccgtatatacatgctgtgggccatgctccagaatctcatcgagatattccgaattgacgaattgctgtcgcaggaacgcttccctatcaactctaataaccggaagcttcgcaacgcttccaatcatatttatcgccacatcgtaaagctcttcgtcggttttcttagccatgttctctccactccgataagacgcatcgtgcttaatgcccatggtatctgctcctttatttgttcgatggataacatgcgggcaatccacattcaccatgggccatgttttctccgcgagcgcgacgggctttcaacagataggatctgcttccaggtcagcaattcgtcagaatgcgtccgcgcgccttcacacactctcagcactctcatgcatctacatctcaattacatactttgtcactcatgcggcatgttcaatcgccaaagaatgtacagccttttatatcagtgcccatccaaggctacgtttacgtcctgaaatacggtgggcctccttttctatctcattgctgctacgaatagcagcaacagcttccaagcctcttagcaatgctcaaatccagggtctcttccttttgccaagccacataggcatatataaatcaacattccgccttctctgaactacactgttcctagaagagtttcagtgttgaaaggggtaaccgatgacacgcaaaggtgggtttctgaaggggatcgtcgcatcggcggcgacctatgccgtcaaaacggcggtcgacattgcggccaatccggaaaacatgcagaaggtggcgcagcttgtcagcgaacaacaggtaggcagcaagcttaagcaggccgctgcgaacatgcatctgccggccgcgcttagcccatccgcaagagtcgccaagcagcttgacgccattgaggagacactggagcaatacgccgaccgatttcccgtaaacgcaccagtcgaacgatggaagagtaccctgcaaagccttcgtcttatggacgtcatgaacagatccacaaccggcagcgagcataagaaccgcttagaaaagctccagacgcagaccgaagccctgttcaacgagatcttccaggctctcgactcgggcgatgcccagatcgaagactgaccacttccccaccgctttcatacctgtcccccgccactcccaagcgcaccgacgcgtctgccggtcgtatactgctaccaagtggatttgaggggaataaccatgatcgacgacgattccaacgaactcatcccattcgaaggcggagacggtgatgccgatgccagcaccgggaacaacaatccagacgacacgcaaagcgtcaccatcatccaagacgaacaaggcatcgtcttcctcggcgacgccgggaccatagatctctggctcaaggacgaaggcttcgattccaaggctttcacggccaaagtcatacagaccgtctcgtcggccagcaaaggcgcacaggcagccggcaacgccatggccgaaagcggacgttgggtaaaactcaccaaagaatcggctgagctggtcgccaaatacggcaagaactgtaagaagggaccgttccaagccggtgttgtacggcaaccgaacgggcgcatcatcaaacatttgaaatttacccagcccggacagctcaaccccgctttactcaccggtgtcagcggcgtcatggcacagatggcactggaacaagccgtctccgagatcaccgattacctgaaggaaatcgatgcgaagctcgatgatctgctacgcgatcagaaggatcagaccgtcagcaagctcgccgggatatcccgcatgatcgacgagaccatgttcatctaccaacaggtcggttcgatcagcgcaaccacatggtctaaggtgtcaggctgcccgcaagacatcgccaccatccaagcgtacgcgatcgccaaaatcaagagcctcaccgagaaggctgaacgcgagcaggatcccaagcaggttcgcccgctgacccagcagattcgtcaggagatccaccagtggctgggcatgctcgcatccgcggtcaagatgcaggatcaggtctcctgcatcgagctcgcgcgcgtatgccaagaggagcctgaacagctcgaagcatacaagaagggcatcgtacttgccaggaacaagcgcctcgaagaaatcgagcaatcgctcaacgcattgggcaagcagctggaggagaaagcgaaaaccgtgggcggacaagtgctactgaacccttacagttcacctcatgccattgccaacatcgaaagtatcgccagcgatctcaatgcattcgccagcacattgcaacttgagcacattcatctgcacgtcgaagacggtcccacctggatcgaagccgcgggcaaagccgtagacgacaccggcaaggccttgcagaatgccaggcagcagaccgcacacgccgtccaagacgtcggcaatgcgatagcgaatggcgctcagagcaccggtgccgccgttgccaagggaatgcaggacgccggaaaccaggccgcgcacatcgcgcaggatgcgggcgacgccattgcgaaaggtgctcaggacgcaggcgccgggatagccgacggagtgcagcagcttggcaaaggaatagcagacggattgaaacagctcccggagatcaaactgcccaagttcgggtggggcaagaaataggttggagaatcacggcgtgagctaggagtatgtccgacttaagagacatgtttccagttcaccttttaatgttctacatgcccttcagtcagtagcttcgttctttgttatccgtagtcgtcctcatcgacacatcatgagcgaaatccgaagcctcccgctcattctcgaacggctctacgacccggcgtgatgactgcaatcgcgcatttagtccttttcaatgcgataatctccaagaaaacgtccacaaccccaatgctcagtagtggtcgcgcacggacaggatgcacaggtcaccaccatcgaccatgtacaccaaacggttcgcggaatcgatgcgccggctccacgcgccctgcaattcccatttgagcggctcaggcttaccgaggcccgtgaacggggaacacatcgtatcacgtatcaacacgttgacgcgtctgagagtcttcttgctctgggtctgccaatacagatactcgtcccacgcatcctcggtccaacgcagcaccgctcactccccgaccagatcgtgcgtggcggtaccaccggaacgcacctgggccattccacggcggaccttgtcgaacaatccgggattctgatagacgcgcagcgtttccatgagcgactcgtaatcgtcggcactcatcaccaccacgttgtcgtgtgggtccttgttggtgaccagaagcatgtctgcatcatcattcacgcgacgcagatacgatttcagatccttacggaaattggtgtacgcaaccgccgtgaccatggcaatctcctcttcaatccgacaacatatgtacagaaaacggtacagcaaaagccgaggagactcaatcccaagattcgccacggtaggcgttcgccatcccttcacagccccacgtgtgccgcatgatcgcgaaccgtgccctcctcatccagactgacagacgggaaaccactcgaatcatcaagaaagtcacagatcagccgccactggcgccggcttatgccaatacgctcgtccggcctcaccatgagcaccggtgccgcaggctccagcgactcgatctgcgttttcgacgtggaataacactcctcgtcatcaatccagacaatcggcaacggctcctcctgccgtcgttcgaaccgaacgcgcgacataatctccgcaagcttgcccgtcaaccttctctcattggtgaccggatcataccagataacagtccgttcaaccccgggatcccagccaagcatggggtcaagcacccttgagcaatacggctgccatgtggtcagccagttcaattcggcactgccggaaagggccagttcatgcatcatgccggcaagctcgcgtgaccagtgcacgcggaaccgcccgcgccccgtacgcacctgctcgttaccggtcagcggaaacgcacgcgtggaatcgtacagttccttacgtgggtcgccttccttcagccattgcgtatggccgacccctccccgccgaagcaccttgtcatcggggaacgcgttcagcacaccgtcaaaatccgtgtagatcaccgcccgaaccattacgcctcctggtaagccctaatcctgcagcgtcctgtaattattcactactatctaccggacaaatcaagccggcctattttcgctagttgctttatttgtggcagccgaacgccgaaacccgaagtatgagcgttggaattccaacgctcatactcgccataatcgccaaacagtgccacaaacaagccaacaagcattttggggaaggcttttcgcgtaatgttgcgctctatcattgataaaggcatccagcaatcgcataccgtaaggaaccacatgcgctatttcacttcggacacgcatttcggccaccctctggtcaccgcactgcgcggattcctgaacaatggcgggctccgcgccgaataccgtgatgtctggcaggcgcaggggcgtgccgccgcgcacacgtggatcaaacaatatgtgcgcgacaatcagacgtcgttcaaagcaatctgcgacatcacacgccatgagaacaccatcatcggcaacatcaacgagaccgtcgggcgtgatgacgagctatggattctcggcgatctctcctaccgttgcaccgtcgagcacacgctcgactgtctacgccgcatcaactgccgccatctgcacctgatcatcggcaaccacgaccgcaacttccgtctccgctccaatgacgcgctatacgagaacgtgttcgagaccatcgacgactaccgtgagatcgacatggagcttcccgttctcgacggaaccggcaagccgacggccgcaaccacacggcagaccataggcatgagccactttcccagactctcggcattgaccgaagaacacggcaactggccggaaaactggaacaagttcgccgatgtggcaccgaccaccgaaggttggctgctctatggtcacacgcatcaaggcattcccgacggcaccgatccgctcagcgtgaacgtggggctcgacgcatgggatttcaagccagtcagcgagcagcagctcctcgcctggttcacattccggcacgccgaccaatcaaagtaaattcccccgagcatgcgtcatcgtccggaggcgaagcgggtgaggactcccgacttggccaaggctcggtagaggacccacgaaccgaacccggcgaatacgaccgcgctcagcaactcgcatgccgtgccgataaggccgcgcgggctgaagaacgagaacgcctggtagtagaagaacagcagatagaagttgtagacgatgccgaccgccagtgccgccaacagtgtgacgccaagcgtccaacggcggtagcggaacagtgcgaacaccgtttcggcggcgagcgcctgcacgagcgcgatcactaccagactcacactgtatttcgtgccgagcaccacttccacgaacgaggcgactaacagcacgtaggccgacgcgcccggtttgcgtacgatcagcaagcccagtgtggcggggaaatagaacaatgcgtgcagcagtgccgcggagcctggaagtatcagagtcagtaaaggaaacaagccataggacatgccatcgaacacccagaacatcacgccggacattacgccgacggccgctccgacggcgatgtcgacgacacgccatttcaggaatctgcgtgtttcctccgttgtttgcggagcatgcttcagcatcgggatgcgtggtttttgggtaatcgtttcagaggatggctctgccatgatgaatccttgccttggttgacgccgcgcaccgtgagttggagatcgcggcggtcgccgtgggccgttcctcgacctgcgcggcccgggcaggaacgacgcgcgccattatacggcctattgttgccgaaaatgttccatgctccgagttccggccgttttcgctcctcaacgcataggaaattcgccgctcgctggcatgcatgatgccatgtgagaaagccaagaagccgcgcatccagtccaaaatgcgtggcttcttgcttgagcaagcactgtttcagtggggaatgacttcagcaacgtccttcgtacaggaagtaagacatgggctcgtcatccgccaaaaggcttgtcgtgccgaccgtcaacccgctggacgagctgtctgtcggattcggccgcgaggaaccatcgttccggtcatcacgttcggctttgcggattagtccgcgatggtcgtagaagccgacatcgcatgtgctgtcggtgaacaggaagtattcgcgcaggccggcgtcatggaatacgccaagcatatggttgaacagtctgcgccccactcccatgcctcgtgcggccggggaaacgacgaacagcaccacttcggcctcgtattccttgcccgcgtcatgtttcaacgcctcgtcggcctgtagaatggccagctgcgcaagcaaaccgtgacatccctcgtggcttgccagcaacggcaacgtgaggcaatgtcggcgcagcatatggcgtgtccgctgccgaccggtgatatccgaacgcagcgatccgagaatcacgccgagcacctgcccattaagttcggccacgtatgctttggtggtgcgggccaggcaatcctgcatgtcgattgcggcaagccgatgcatgttgcgcagacgggtcgccttgcgtagttcggcgcgacgcttgtctgggcctgccgcctgtccgacctcgtcatgcgtgttgtgtgaatcgttgccatcgtcgtaccatgcgagccgtatcagctcttccaaagcgggaaaatcggtgcgacgcaacggacggatggtaggtgtttcacaagtcatgcaaccatcctatacctcgcccctatcgaagatgcgctcagggcaaatgcgaaagaatcgttcgcattcgggcacggtacggcactctgcgggaacgatttcattacgctgatacacggtatgaagtgatgtaggacgatgacgacacgaggcttgcgatgaagatgatgctgcgacggctggcgattgtggtgtgtgttgcgctggcgttgctgtcggcggcctacgcgttcgccgtgttgaggacgcattcgggcacgggattttggaaggtctggctggttctcgccgttgttttcgcattgctggcgattggcatcgcatgtcactggtgggcggcgcttccccggatcatcaggggcgccatcatcgctgtggtggccatcggcattgtcgcgttttgcacaatagagggttgcatcatcggcaatatgaacgctcagggcgagccggatcttgattatgtgattgtgcttggcgcgcaggtgcgcgagtcaggccccagcaaagcgttgcgctatcggctggacagaaccatcgattatctggaggagaatccggataccatctgcatcgtttccggcggtcagggccataacgagccgttctccgaagcgcagggcatggccgactatctgcagaagcatgggattgcggaaaaccgcatcatccaggagtccaagtcggaatccactatggagaacatcgtcaacagcaagaagctcatgcggcaggagaacgcttcggtcggtatcgtcaccaatgatttccacatgttccgtgccttgcagatcgcacatgccaatggtctgaagcaggcgcagggcatcgcggcaagttccccgaaggacatgctggtcaacaatatggtccgtgagttcttcgccgaaatcaaattcctgttctcatagccgccaatcagcgtttcagtgcccgtcgtcactacggaagatgcgtgccgcgcggcagccattccttcttcggcagggttgcgaatgtgggccattgttccgcagcggcaccggccgcgtccagccgacgttggaagccgggccatttcgggtcggcttccaacagtcgtccgagcagtatggcggtggcgtgagcgtcgcttaacgcgctatgcgcatcctcgttggcaatgccgaaatactcgcagcagtcggcgagcttgccccgtccgatcagggaacgcgacagtttcatcgtgcacagcatggtgctttgatcgaccggaatggaagctcccatacgcgagtattccgcgagtaggaaccgtgaatcgaacgacacgttgtgtgccacgaacacgcgtccggcgagcaggtcgcgcagctcatgcgcgataccttcgaaatcgggagcatgcagcagttcgcgtgcggtaatgtgatgcacccatgaggcgccgacactgcgatcgacatgaatcagcgtctcatgctcgtcttcgagcgtaccgtccggagccacatgcaccaggccgatttcgatggcccggtcgccttttgcgggacttaaacccgtggtttcgaagtcgactaccgcatatccttgagaattcatcacacctgccagtatataggtccggttaaggtccggttagctatctctgctgctcgtcagacgttcgccgaagcggcatgcgctatggttcggatatcgtctggagtcgttcggcagcatcctccaatgagtcgggctcccgcgtcgatccattgcggtaccagatgggcgaaggccggttcggaaccggtgggattaggcgaccaggttttggttttcggatcgtagatgtcaccgttgttcggatacacgatgatcggcttgtccgtaacctgtcggatggcccgaattgctggaagcacacggtccatcggcacgcagttgacgccgacggcttcgatttgcggcacgttctggatgtaggagacggcttcggccaggtccgtgccatccgccatatcgccattttcggacaggctgaacgacagccatgctgtcatgttcgggaattcgtcccgtaggagaccggtcaaggccttcacttcgccaatgttcggcatggtttcgaatgcgaacaggtccacgccggattcggccatgacctgcatgcgaacgcgatggaagtcctggtattgttgcccgctcaacgcgtagtcgccggtgtattcgctgccgtccgccagaaacgcgccatacgggccgacgcttccggccaccaacggcgtgcgacgggaggggtgccgctgcgaccaatccgcgcacgcgcgtttggcttcttgcactgcctgcgcgatcagcgtccgtgattcgctttcgctcagtccgatgttggcgaatgcctcgggattcgcctgataggtgttggtggtggcgaagtcggcgcccgcttcaagatagctcatatgcacgtcgtatatggcttgccgctgatgcagcaacgccgcggccgaccacagttcgccgctggtgtccacgccatgtttttccaattcggtcgccatggctccatctacgatcgcaacatgcctgttatgcaataattgccgaatcgaaccgttttccatcatgccttctccttctgtgccgtgcgcttatgcaggaattccttgccgtaatacacggcatagcaagccgcgatgaacgggaccatccacaacaaggcgcttcgccgagatgggtcgaacacgatcagcacgcatgacagcaagctggtgatgaaggcggcccacggaacaatcggatatcctggcgtgcggtaggtgagttcgtccacggtatgtccggaagcgatccactgcttgcggaaccgaatctggcagattgcgatggccatccacacgatcacgacggccaaaccggacacggacaccaataccagataaaccgtggaagcggccacgacgctggacagcaatgccagcagaccgccgatcatgctcaggcgaagcgcggtcatcggcactcccctgctattggttttggcgatgttgtgtgggatcatgtcttcgttcgccaaggaccacagcatgcgtgtggaggcgtacaacccggagttcgcagccgaaagaatcgcggtgagcacaacgaagttcatcacgtcgccggcgaaaggcagaccaatggagttgaacaccagcacgaaggggctttcgtccacaccggcgtcctgccaaggaatcagcgaagccatgaccacgatggaaccgatgaagaagatgacgagacggaacagggtggtgtggctcgccttcgggatggctttgtcaggatctttggtctcgccggccgttacgccgatcagctcggtgccggagaaggcgaagttcaccgtcagcatggtggtgaacaccggcatccacccgttggggaacaatccgtccttcacgaagttctcgaatagcggcgcatggtcatacccttgaatcggcagcacgccgaacaccgcgcaaccgcctatgaggatgaacagcacgatggccgccactttgatgaaagagaaccagaattcggtttccgcgaagaagcgcacggaaagcacgttcgaggtgaagatcaccacgatgaacagggcactccaaatccataccggcgtgccggggaaccatttgcgcagataagtccggcagcggtgaattcggaccccaatgcgaccgttcaggtcagccaatacaggatcgcgacggtgaagcctgttccaggaccgatgaatttggtcgtatacacatggaatgagccggtttccggcatggcgacggaaagctcgccgaggctgagcatgaccagatacacaatcaccgcgccgatagcgtaggcgatgaccgtacccaatgggtccgcctggttgatggtgtagccggagctgaggaacagtcccgtacctatcacgcctcccagtgaaatcatgcggaggtggcgtacctccatcttgcgtttcaaatcggtatgcgtggtcttcgcagggttctcccgcgtagcgtccttcatttgattctcccctctatcgtcggcggaacatgtcgccgacgcctgattcataatattggttgcatcattgaggagagtcgaacctccagtatttgagagaaaaacgaagaaggctggaatcatcaaaggattccagccttctttacgcgtttgtcagcgctttagcctatcggcggcagcgattcactcggcgtccttgtcggcggcgagctcgtcggccacagcggcggctgcggaagcggcttcaacgctctcggactcttcgtcttcagcggcttcgccgaggaaggcgctcaggtccagggtctcgccctcggacttgaaggtcacggcgcgcatgccggagagcaggcccttggaacggccgacttcctgcacagcggaaccgatctggccgttgcggatgatggcctggatgaaggcgttcggatccatgccatactgctgggcgatggaggcgaggaagttgaagacctcaccctgggagaccttgacgtccatggtctcggcgagcacgtcgagcaccatctggtcgcgcagttccttctccacggtttcttcggcttcggccttctgctccttggtggccttggacggatccgcggtcacgttcttgagctgctgctcgaccatttcggccttgacgcccttcggcaccggaatctcgaggccatcctcgagcttggcgatgaacgcgtcacgagcggcggtggcctgacggccttcggcgtcctgagcggcgaccttcttcaggtcttccttcagctcgtcgagggtgtcgaactcggatgcttcggaagcgaagtcgtcatcgagttccggcagttcctcggccttgacggaattgaccttgaccttgatcagggccttctcgccttcgtgcttaccggcctcgagagtgccttcgaagctggtttcctcaccggcggacaggccttcgagggcctcatccaggccgtcgagcatggtggcggagccgagctcgtagctcacgccctcctgggagtcgacggtttcgccgtcgatttcggcgttgaggtcgatgttggcgtagtcacccttggcggccggacggtcaacgctcacgagggtgccgaaacgctgacgcagggcttccagacggttgttgatgtcctcatcggtgacctcggccttggcgacctcgatctccatgccgtcaagagccggcagttcgatgtccgggcgacgctcgacggtggcgacgaacttcagcttggtctcatccttggcggattccggcacgtcctgaacgtcgatctccggctgagccatcgggtgaatcttcttggtttcgagagccttggaatacagctccggcacgccgttgttcacagcttcgccggcgacggcaccgaagccgatacgctggtcgatgatcttgccgggcacgtggcccttacggaagccaggcacgttgacctgctttgcgatttccttgcgagcctcgtcgagatacgggttgaactcctccgggtcgacggtgacggtgagcttcaccttggtcggctcaagattcctgacgctgattttcacgcttgcgctcctgaaaaatacggttcttcatatttctgccgttaggcaacctctacataatagcgcgacttacggactctgcaactagggagacctgccaatcgcgtgcgccctgttcgccgaggaatcgcgcgacgtcacgcttacgaggttcgtccgtccagcacaggttacgcaaatactgcggtttgatgacgatttccacaggcgtgcgcgtgtcctccgctatctgggagaccgccttgcgcaccctgttgagcacttgcagacgttccggataccgttccttccacacgcgaatcgatttgggagccgaagcggactgcgattcatgacgccgcgcggcgccgccgtccacgtccggccattcgcttggcggcagggcgagcgcgtcctggatgatgttcttccacatgctcggtttgattttgcgttgaatcggcgcgtaccgttcgaacatcttgtcctgttcggaatcggtatggatgcgcacgcgttcgttgatggagcgaatcgaacggaattgcgcagcgttgtgtggtttgcgtttcgccacttcgatgatggagctgtcggacaatagcagggtcggcgcgatgtcgtattcgcgcgcgagttcgtcacggcgggtccatagcgcgcggacgatggccagcgcctgccggtcacgcatgacttcagtgatgtgtgagacatgcatccagggaatcggatgctccttgcgtggtcccagaccttctttgagcgcgtaatcgaactcttcctgggcccattccatcttgccttggcgtttgagttcggcgcgcatcttcgtttcaagctcgatgagcagttcgacgtccaacgccgcgtaatttcgccagtcacgaggcaacggacgatacgaccagtcagccgcggaatgttctttggcaagggtcagtccaagaaagtgctcggtgacggcggcaagtccgaatcgtttcaatcccagcagacgcgcggcgatttccgtgtcgaacagccgttgcggttccatgccgagttcgtcgaatcccggaagatcctgcagggaatcatgcagaatccataccgcatctccgacggcacggttgaaatcgttccaatccgccccggccgcggcgagcgcctgcggatcgagcaggccgatgccggctccgtcgcgtttgaactgcaccaaccagtcctcatgcccataccggaagccggatgcgcgttccgcgtccgcggcaagggagccatgtgaggaagccagctcactgcaatagtcacggaatgccggcaacgtgtcgatcacgttgggcacgccttcgcgcggttccgccagcagcttcggctcgtcagtcaacggggttttcctcctcggattgcgtcatggaccggaggaacgacgcccactgtccgacttgggagccggcgtcaaggcctccatcggcatagtctagtggagtccaagacacccggatctcgcagcccaccctgggcacatcggggtcatggccgaatgctgtgttttgggtgactgtgacggtgccggatacatgttcggaatcgtttggattgagacgttccatcatcatgtcccagtacatgcccggagtcaggcagtcgtcctccttgtcgggcagtggcagggatgcgaaagccacgcaacgccagtgggagtgccagtcctctcggaatttgagcgagtacaggatcatgatccagccggatgcgtatgtttcatcgcattccaacgcgacgccgatgccgaagttcgccatggaattgggcaccggaatctcacggtatgtcatgcctttcaaacgccgcatacggtccacggaaagcaccgcgttccagacttggtcgggaacgccctgcggtcgcataagcatggtctgtggggcttcgccgcccatatccgctcccttgccatcggcgcgcgccacgttgcgcgcatctcgtggaaaatcaaagatgtctgccatagttcaaggctacgacagagaagggcatttcgtagtatttcgaaccactttgccacgcgtcgaatgtgaagatttttcagcgtatgaataaattggtccatgccatcgattcagtcggcggcatggaccaatatgaggcgttccgcatatccagcgaatatggggaagccattgagaggacgggcgtttagtacacggtgaagccgtgcgactggaactgctcgaccacacgttgtttcattgccgcggacgggcctttctgatcctccaacgggtatgggatgttcagcatgtgccacttcggacggccaagctggtggaagggcaatacgtcgatatgttccaacgcgtcgccgaaggtctcgcagatcttcgccacgttctcgacgttttcttcggaggatgtgaggcccggcacgagcacgaaacgcacccagatcttcttgcctgccttggccagacgctgtccgaagtcgatggtcggctgcaggatgccgccggtcaccttatggtaggtctcctcatcgccggatttgacgtcaagcaggcacaggtcgatgtcatccaccatgtcatcggtgtagctcgcaccgaggaatccggacgtgtcaaggcaggtatgcactcccatctgcttggcggcatggaacacgcgggacacgaaagccggctgcatcatggattcgccgccggagaaagtgatgccgccgccggtggccttgaataaatcggcataccgctcgattttcttgaccatggcttcgtagtagacgggcttgccgtcacgcatcttccaagtatccggattctggcagtactggcagcgcagagggcatccgctcatgaacacggtcattctggtgccaggaccatccacggaagtgttgatgtcccacgagtgcacgaaaccgatatcgccgcttttcaacgccttgatgcggtcgagacggtccaagccgattggcgattcgaatccggacaggcctcccatcagcgtctggttgacgtagtccttggaatccctcagcatgtgtctggtcgtggaacggaaaatatgttcagacatcaatgtcccctttcatctgccatcccaatcatatgggaaaacgatatgggaaaagcgaaagggacgaagccacgagctccgtcccttcgcattaccgtcgtttcatgcgacggctttcatttggctgattgtgccgttcagtcgacgacagcgccctggtggaacgtacgggagatcacgtcgagctgctgttccttggtgagcttgacgaagttcaccgcgtagccggagacgcgcacggtcaggtgcgggtacttctccggatgctcgacggcatcctcgagctgctccttgcgcagcacgttgatgttggcgtggtacaggccgtggccattgccggcgtccaggatgccaacgaggttgccgatacgctcttcctcgtcgcggcccagaccatcaggggtgatggtgttggtcagcgagatgccgtcaagagcgtcgttgtagtcgatcttgccgacggagaacatggacggcagcatgccgtgggagtccatgccgttctccgggttggcgcccggagcgtacggggtgcccttcttgtggccggacgggaaggcgccggtggccttgccgtattccacgttggaggtgatggtcaggatggactgggtcgggacggcgtcgcggtacaccggcagacgcttgacctggcccatgacggtggagacgacccacttggcgatgtcgtcggcacggtcatcatcgttgccgtacagcgggaagtcgccttcggtgcggtagccgacgatcagatcgtcatcggcaccttcgacgtactcgttctcgtggcccggcgtggtcttggcgtccttgttgtagatcgggtagaccttggcgtacttgcatgcggacagggagtcggccgcgatcgacaggccggacatgccgcagccgagggtgcggtacacttccttgtcgtgcagagccatctcgatggactcgtaagcgtacttatcgtgcatgtaatggatgatgttcagagccatcacataggtctcggacagccattcgagggccttctcgtagttggccttgaccttctcgtaatccagcgtgccatcggcttccggcttgatcgggtcgatgacgcccttgtcgatgacctgcatgccggtcatctcgtcgcgtccgccgttgatggcgtacagcagggccttggcggagttcacacgggcggcgaagaactgcatctgcttgcccacgcgcatcggggagacgcagcatgcgatggcggcgtcgtcgccccagtgagagcggatttccttatcggactcgtactggatggccgaggtgtcgatggagattcgggcgcagaagcgcttgtaggcttccggcagcttcggatcccagaagatggtgatgttcggctccgggccaggtccgaggtgctcgagggtcagggtgttgagcagacggaacgaagtcttggtgaccatggtacggccgtcgtcgccgaagccggcgtcggaccaagtcgcccagtacggatcgccggagaagatcgcgtcgtaatccttggtacgcaggaagcgcacgatgcgcagcttcatgaccaggttatcgatgatctcctgtgcgtcggtctcggtgatcttgccggccttcaggtcgcgctcgaagtagacgtcgaagaaggtggagacacggccgaaggacatggcggcgccgtcctggctcttgacggaggcgaggtagcccatgtaggtccactgcacggcttcctgtgcggtctgtgccgggcgggacaggtcgaggccgtactcgttgccgaggttgatcagctgcttcagggccttgatctgctcgtcatgctcttcgcggaagcggatccagtgctcgatctccggctcggtgaagtcgttgcggtacgggatggagtccttgtcgcgctgcttgaacttgatcagcgtgttcacgccgtacagggccacacgacggtaatcgccgatgatgcggccgcggccgtaggcatccggcagaccggtgaggatcttgttgtggcgagctaccttgatctgcttggtgtagacgccgaagacgccgtcgttgtgggtcttgcggtacttggtgaagatcttcttgatctccggatcgggctccttgccggcttccttgatggcctgctcgaccatacgccagccgccgttcggcatcatggcgcgcttgcacggcacatcggtctgcagaccgacaatcacattgtcgacttccggggaatcgatgtagccggccgggaaggcgtcgatgcccgccggggtgtgggtgtccacgtcgtagacgcgctgcttgcgctccacggacagatagttgtcgtccagatacttccacaggtgcttggtcttgtcggtggcgtcagccaggaaggactcgtcgccctcatatggcgtgtagttcttctggatgaagtcgcggacatcaatgtccttctgccagttgccctcggtgaagccttcccaagccttagcctcaagttcctcctgggagaccgccgttgcatcaactgctgccatttccactccttactgggtgtcggttggcgacgcatcgttacgccgtcgctacttcacgattgtaacggcaatcatctgcgaaaagcctgaaaaccacgcccgaaattagtgacataaatcacaatcgggcgtggttttcatatggaattcacttttcggaagatgccgagccgtccgctgaccagcgtttccattcgcggtcctgttcctcccatttgaggttgcgttcctgcacgatcttccacgcgtcgagcgcgtcctcacgggttctgtacggccccatgcggtggcttgccggagagatcatgcccaattccggctgctcggtgacggtgttgaaataccactgcttttccatatcggcttccttcggctctcgatgttctacttgcgatcgccgattattcgcggaatgcgttggtgaccggcagacggcgatcacgtccaaacgccagcgccgtcaccttcggtcccagcggatactggcgacgcttccattcggcgcggtcgaccaatcgcatgaccgtgtcgacggttgcctcgtcgaagccgtcggccagcaggtcggcgcggccatgagcatgctcgatgtacatcgccaatacttgatcgagcagcgcgtattccggcagcgaatcggaatccttctgccctgggcgtaattcggcggacggcgccttctcgatcgagttgacggggatcatcacaccatccggcagcggagtgcccgcgctcccctgctcgttgccgacgacatgcagaccgccgatgcccatgccggcggcggcagccttgttgcgccagcgggagatctcccacacgcgggtcttgagcaggtccttgatcggcgcatagccgccgaccgcatcgccgtagattgtggaatagccgcatgccagttcggacttgttgccggtggccacggccagcagtcctttggagttcgagtaggccatgacgatgacgccgcggatgcgcgcctgcaggttctcggcggcgacgccttccagttccagctggttttggaaggagacgaacagcggctcgatgggctggatgtcataatgcgcgccgatattgcgcgccagatcagctgcatcgtccttggatccgtcggacgaatacatgctcggcatggagatgccgtacacgttctcgccgcccaccgcgtcggccgccatggcagccacgagcgcggaatcgatgccgccggacaggcccaggcacacgcccttgaaatggttcttggccatgtaatccttcagacccagcacgcaggcggtgtacacttcctcgtccggatcgggcttggctgcgatcataccgaccttctgatgctccacggacgtgtccaagtcgaagaagctcagatcctccatgaacatcggcgagcgctcaagcagggtgccgttggtgtccacaacgaagctgccgccgtcgaaaacgaggtcgtcctggccgcccacttggttcaggtagatcatcggggcgttcacttcggccgcgcggcgcaccgcgaggtcgagacgggtgtcggttttgccttcctcgtatggcgaaccgttcatggtcagcagcaggtcgatgttctccttggcgagttcggccacagggccgccgtcctgccagatgtcctcgcagatggccacgccgatgcgcgcgccgttcatgtcgagcaccatggatttgttgccggggctgaagatgcggaattcgtcgaacacgccgtaattgggcaggaaatgcttgtcgtagccggcccagacaacgccgtcgtgcaggacgacgagacggttgcgcggtttggaggtttcacggtcggtgcctacagtgccgaccaccacatatagttcgccgagactgtcggatgccagttcggtggcgagccagttggctttgtcccatgcggctttgcggaaggtggcacgcagggcgaggtcttcgatggggtatccggtcaatgtcatttccgggaacacgacgacctgcgcgccctgctgagcggcgagatgcgcgtaccgcatgaccttgtcggcgttggaatcaaggtctccgacgcaggtgtcgatttgggcgagtgcgaagcgaatgtctgtcatagctgcctaacttaccgttgatttgttggatatgttgtgttttttacgattatgaaaattacgattacggcgttccgcacgtggcgtcacgacagttcgttgagcaccgtcagcgccgcgttggcgtagaattccacgccggcttgcagcgattcgtcaagaccgacgaaatgcgggctgtgccaatccgggcagccttcctcgccgttggaaccgatgaaggcgaacaccggcatggtgacgggcatgaaatcgcagaagtcctcccccgccatcgacgggtggatgggttcgagctgggcgtaatcgcgcacgttgtcggcgactatcttggaaagttccgtatcggagacgagcgggttctggaaatcgtcccaatcgatgtcggcggtgatgccgtaaccggccgcaatggactggacctgttgcttgaagcgtttccccaccagttcaccgtcggacttgtggaagtatcgtacggtgccttggaagctcgccttgtcgggtacgacgttccacacgtggccgccgtgcatctcggtgatggacagcacgagcggatggaacggcgatacgttacggctcacgatggtctgcaatgcgaggaccatggtggcgagcgcctcgatcgggccggtgcccttgtgcggatagccggcgtgtgtgccggtggcgtgcagggttacatggaatttcacgcagccggccatcatcggttcggggccgacggcgatctgtccgggcgcgtagttcgggttgttgtgcgcgccgatggcggctgatacgtcggcgagcagtcccgcgtcgaccatggccttcgcgccgaggccaagttcctcggcgggctggaacagcagtttgatggagcccttgatgtgtttgcggcgcttggcgagccagaacgcggcaccgagcatgtacgacatgtgcaggtcgtggccgcagccgtgcatcacgccgtcgttgacggatgagaacggcaggccggtgtcttcctggatgggcaggccgtcgatgtcggcgcgcaatgcgatgcgtggtcccggctggtcgccgcggatcagtccgaccacgccggtttcgagcggattgttgagcacttcgatgtcgtgtgcgcgcagcagcttctcaatgtaggcgctggtctcgtattccttgaagctgcgttcggggtgcgcatgcagatagtgcctgatttcgatgatctccggcgtgatttcgatatgttcgctcatggttgacgattgtaggcacatccggccgtttttcctattttcgtggtcgtgttccgtgccgtgcacgacgttttcgcacatatcctcgtaagctggataccgggtttgacatggtttttcatggaggcagcatgactcaggacatcaagacggcgtttttcgacatcgacggcacgttgacgagtttcgtcacgcatgtggtgccgcagtccaccatcgacgcgttgcatgcattgcagcgcaatggcgtgaaggtgttcatctgttcgggccgcgcaccctcctacatgggcgtggtgcttgataccattcccgtcacgttcgacggcatcgtgggacttaacggccagtattgcaccacgcgcgacggtctcgactaccggcatccgatcgaccaggccgacgtgaagctgatcaccgactggcttgaaacgcatgccgacgtggtcgccaactatgcggaaagcgactacgggtatttcaatcgcacgaacgccgcattggaacgcacgtggaacagtctcggcaagaccgcgccgaaaatcgacgtgcatgatccgcgcgaacgcatcgcaaaccattccacgttccaaatcagcccgtatgtggacgagacgatggaagccgaaatcgccagcatgtgcggcaacgtgcgcggcgtcagatggcatcccgctttcaccgatctgattcccgccgatggaggcaaggcggttggtatgcaggtgatgctggagcatttcggctggacgaaagacaacgcgattgcattcggcgacggcggcaacgatgtggacatgctacgattcgcgggaatcggcgtggcaatgggcaacgccaccgacgagccgaaagcggcggccgattacgtcaccgacagcgtcgacgacgccggcatagccaacgcgcttaagcatttcggcgttatatgatggtgtttccgcaagattatttacgattcacaagtctgtttttcgcatattcctgcggttttcgcgccctttataaataattccgataagcgcgcgacgtgttgccgtcacaggttcctctatattggtcaatcgttggcccgcaaccgcagtaagcgtccgggccgtgtagcgaaattgagagagaggaactcaaccatgcgtaacaagaagattctcggcgcactgctcgccgtcaccacgctcgcgaccttcggcctggcaggctgcggcaattccggttccaacgatgccgcctccaaggaggacgacaagaccatcaccgtggccgcctccccgaccccgcacgcggagatcctgaacaaggcggccaaaccgctcgtcgagaaggacggctacaagctggtcgtcaaggaattcaccgactacgtgcagccgaacaccgccaccgaggatggcgaggttgacgccaactacttccagcacaagccgtacctcgacaacttcaacaaggagaagggcacgcatctggtgtccgtggagggcatccacttcgagccgttcggcctgtacccgggcaagaccaaggagctgaaggatcttcaggacggcgccaccgtggccgtgccgaatgatgccaccaacgaggcccgcgcgcttctgctgctgcaggatgccggcctgatcaagctgaaggatccgaaggacatcaacgccacgccgaaggacatcacctccaatccgaagaacctgaagttcaaggagcttgaggccgccgtcgtgccgaccgtcatcaaggatgtcgacatcgcggccctgaacggcaactacgccatccaggccggcttcgacccgaccaaggacacgctagccaccgagaaggccgacggtctggccgcgaagacctaccagaacatcctcgtggtgaaggaaggcaatgagaacaccgccaagaccaaggagctcaagaaggctttgaagtccgacgaggtgcgtgactacatcaacaagaactacaagggcgctgtcgttccggtcttctaagacccgcttcggcagtaggagttcaatgccgcaggtatactaccctgcggcattcttgttatggaacacgattaggaacaggacattatgacgattcagatcgaccatctgcacaaaagctacggcagtggcgccgaagcgcatgaggtgctgcacgacattaacctgaccatcgattcgggtgaggtcttcggcattctcggctcgtccggcgcgggcaaatcgacattggtgcgttgcatcaacctgctggaacgccccacttccggcaaggtgctcatcgacggacgagacatcaccggcgtgaaaggcaaggagctggcggacgtgcgcgccggaatcggcatgatcttccagaacttcagcctgtttcaacagcgcaccgtgctgcgcaacgtgaccttcccgctggaactcaaccacacgccgaaagccaatcgtgaggaacgtgcgcggtatctgctcgatctggtcggtctggctgatctggccgaccgctaccccagccagctgtccggcggccagcagcagcgcgtggccatcgcaagggcgttggccaacaatccgtccatcatgctgtgcgatgaggccaccagcgcgctcgactccaccacgacggcgcagatcctcgacctgctgcgtcgcatcaaccgtgaacttaatgtgacgctggtcgtcatcacgcattcgctgtccgtggcacgcaacatctgcgaccgtgtggccatgatagacggaggccgcattgtggaaatgggcgatacggaagcgctgttcgccgatccgcacagtgacattctgaagactttgatcgccgacgcgaaggtgacgaaccatcgacatacgcacgaaacggcggatggcgcgaagaatggggcggccgatgattccgcccagaaagaggtgaagtgagatgggacaggtggtttcgcaattcatcgccgattatggcgaactgctggtcgaaggcgtgcgtgacacgatcatcatgactgctgtggcgacgctgctggcatatgtgatcggcctgccggtcggcgtgctgctcatcacgtccgcgaaaaagggcatccgtccgaacgcaccgctcaacaccgtgctcggctggatcgtgaacatcgtgcgttccgtgccgttcatcattctgctggtggccatcatcccgctgacccgactgattgtcggcacctcgctcggcgtgccgggcgccatcgtgccgctggtcatcaccgcggctccgttcgtggcgcgcgtggtggaacagtcgctcgccgaagtggacggcagtctggtggaggccgcgcaaagcttcggtgccagcaacctgcagatcgtgttcaaggtgctgctgttcgaaagcctgccatcgctggtgcgcggtgcggcactgacgttcatcaccctgttcggcttctccgccatggccggtaccgtcggcgcgggcggcctgggcgatatcgccatccgttacggctaccagcgttaccagtacgacgtgatgaccgttgccgtgatcctgtgcgtcattctcgtgcagatcgtgcagaccatcggcgacgtggtgtccgaccatatcgaccatcacgagcgttgagccagcacattcgcgttccttatgaaaagcgggtccaaacgtttgttgtttggacccgcttttcgtacgcggaaagagacgctgctcgtagacgattacttgttgagctcggccttgaccagaccggccagcttgccgccatcgatggttttgccggcaagcgcggcacgagcggctttgacgacgtgacccatgtccttggggccggccgggttcacttctgccacggcgtcggcgacggctttggcgtagtcctcgtcgctggcggccgccggcaggaaggtttccaggaaatcggcctcggcggtttcgggagcggccttgtccgccagtcccttgtcttcgtacagtttggcggtctcacgacgggtcttgacgcccttctggatgaccttgagcacttcctcgtcggtcgcttcgtgaccgttggcgatctccaggttctggatgtccgccaacgtcaggttgatcgggttgagcttggccttgtccttggctttcatcgccgcgatcttggctttcttcagcgtgtccttcatcgacatgttcgttcctcttttcttgaccgttcgaacaccgtcttaatactacgcgtctaccaatccgccgtcctgtatccgtgccgtcggcatccacgccggtctcaagcccatgagacacttggagccatgactacagttatcatgcgcacctcgcatgatacacgtggccggctgtttttggctttgttccaaggttttcgatttttgggaaacatgccgattacgctcgttctccacgaggcacctacaggaacccaagaataatctcattcttctgtgcatatcagcggcttaccgacgcacacgaaagaagcatacgagtgttcccgcgacctatctcagatggcgaagccgctcgatcagatcgacgagcgtctgttcctcctgttccacgcagtctaggaaaatggagcagaacgaatccggcttgccgtccacctgccatgcctccaggccgcgcgcgtatgcccgacccgcatcgtatttgatggctgcgggacggtatccgttccgtagcagcacgaagttgagcagctggcggccggtccgcccattgccatccatgaacggatggatgttctcgaacatcgcgtggaaaccggcggccctgagcagcggatgcgctgcgcagccatccaacccgtcgatcaaggatcgcaggtcgtcgcggatctccagcgggtccgcggtcttgacacgggtcgcggtggtcctcgccagataaccgtacgggcggaacgtgccgcgggcgaacggttggagatccagcgcggtcacctcatggacacgccgaaccagttcctcgtccagcttccgcccctcctcagcatattcgcgcacgtaggccatgccgtcagcgacccctcgcgctgcgaacacgtatctggccggcgagtccgatgggacgaactcgccctccaataccagcgacgtgtcctccagggtcagtgtggattcctcgatggcgttcgagttgtaggtgtagcgcaccagccagtcgcggtcgtaatccgacaatgccatctcctcgacgccatccagaggctccaacgcgcgggcccggcccttcaacgcgtcaatcctccgcagacattcggcggttcccggctcgcgctcaaggccgagcagttcctcgggcaatgcccgtatgcgctgcgacagctcaggattaggcatcatgctcctcttttcgtgttccggttgcaaagtccattattccagtagtgattcgttgcgctagcggtccagatgacggctcaacgcatccggtccggttccgacgcttctggcatccccgtcccgttgtccaaggttcttccgcaacgtctcgccaaacctgtccatcaaatccgttttattgcggatcgggccagaaacacgaaggacctcaccttccctgatcctgcggagcatcccgatacgctttaccaactgtacccggatggcatcgaggcgttcgggcgcgaacatgcgcatgcgcgacaactcatgcgccacctcgtcgggccagtccgacagagcatccagattgaaccggccccaatcctccaccagtttgagctgccgcaaggccgaggggcgtccggtcgccgaatagaacggcttggcgaaccagtctcggccgtccacatcgagctcgccgctccacaggctcgcgccggtgtcgtagatcggagccgggcggaccgcaagggtctcgatgttccggatcagaccgaagttgttgtaatgcctatctgtattgcgcatgaggtagtcgaccacgagccaatcgtccgtggcgtcacgaaccgcccgttcgtctgcgccgaagccgacggcggcgcggatccactggtcatgcgagttgaggccgttgacggccttgacggattggagcacctgccaggcggagaccagctcctcatgattggagagcatgtccgcgcatgtggacaccagacggttgccgttgcgcgccagggaataccggacggccggaacgcccaatcgcatgcagagcctcgaggcgatgacctcgttcatgggctcctggccagtacggcccgacttgacgagcagtctcctgccggtggccctgtcgattgtccagcgtttgggaagatcgccgccagtggacacgtcgggggcgttgaggctgatgtcatgggacgacgagtacgaggtgagcaggatctcgcccagcgcctcgtcgaagggattgtcgaagaagttgacgtccttccattcggccgggtcatcctcgcgtctgacccagtactggtccgacaggctcaaaccgtaggtccggtcgagcagctccccggtcgatgccgcgccaagcgattcgagcacgcggcggatgccgtcgcgggtggaggggatggcgcgggacctccaccattcgtcgatcctcttggcatacagcgcgctcttgccgtgcgtggtgaactccaggggcagacgatcatggtcaaggacctcgccagaggagcacgcgcgaccggactcgggatcgtattcgaacgcaagaaccggatggtccccgcacataatcagcttgcgtggcatgattccgctcccttcaaacttggtctttaaagattctacaggcacgaattacgcgcgagacggcgtaccgtttcatgacgcgatgcatggatatgggccacttccgcaaatcgcaagcctcggcgatgacgccgacaactgatacggtaggcatattggtttcccaaaggtaaagaggcatgaccatgggattgttcgacttcgctaagaactcttcgggtgacgtgccgtccggcttcggcggtcggggcgatatcgccaaccatcttttcaacgaccgatgaaaaggctccggttgaaggctatggcatgatgacacgagcgtggggacatttatgaccgaaggatactcgcataaagcggcacacatcatcgagcacatcgttcttgcgatcgcgctggtctgggccggcggctgcaccctcatatggacgcaaatagacatgccccacagcatcgtgaatgcgaaatccgctgacggcacctgcgaagtgaccatcagcgaactcggctcgcccatattcttcggcccaagcagcatcacggtcaaagtctcttgggacaccgatcccagtgttatcggttccgagaacgtcacggaaatcaaaacggatctgcacaacgacggcaaatcattaggctcgggcaacttcaccgtcacctggcacggcaacatcccgaccgtcaccacccatggcgaggaacagccggaccaaagctacacattcaactggaaataaccgctccgaacatcatgtctctcccgagagtagtcctcacaaccgggcaggtcccacaaggagcatagctcatgcacccaccggccggtctcaagcccatgagacacttaagaccatgactaccatcatcatgcgcacctcgcatgataactgtgatcgactgttttcggctttattccaaggttttctgtccttgggaaacctgtcggtcacgctcattttccacgaggcacctacaggcacccgaaaataatccgggaacactccaccgttctgtcggcgctcagcgtcttcgtcgaccggcatggaaaagaacaatacaccctgtggtttcatgatgttcagcatgggtgacgcccaaaagcattcgtccagcagcacgcctccgcgtcggacaacgggcagaacgatacgcgtcccgcgcaaccgtcccggccgtcacaatggcatcccgattcattcctgcgctatccccacatacctcgccgccgcgccgatcgcgttcaccctcgacgaatatgaggccctgaattccgtcagcaaccggacggccttcaccttgaactcgcccgcgcatcaagtgccctttgccataatcccatcatctcccatcgagttaggggaatgcggaacaaaaaatcagttcatatcactttttctgttccttgaactgagcctggtctctccagcaagtcctactacaataggactcattcctccgcagttcgagaatcgagtcaatatgcgccgaatttgccacattcttgtaggtctcctagtgtgtgccggactcctacgcacagtaagcggctttatttttgactacctacatccagaatacgtgtccagctttccttcatacctttattttttacgagcagttcccttccttatcactgctggtgccgtcgaaactattttattcgtgataaaaaggagaaataaatgaagaaactcaagcaaattgccgctactctagtatctgtaatattggctggaactgtgacagtaaatgcgtcggcagcagaatctatggagactccctataggagtcctaccctatctagctttccgtctaatgcttctctggaagatcttgagaaagcctcagataacgaagatctgagaattatctcatctccttctcggggcgctaattacaaaacgcgcgctgcagaggctgtagctttactgcggatttattccactacaggatctggctcatcatctagtttcacgaatctcggtcattcttggcttatgatcacaaacctgtctggttctacggtaaacattgctgggattaacgttgctgatggtaaatctataacagcaagcacttgggatgaatctgtagatgtcagtagagaacataagggtctgtggctcaatcttgattcgaagcttaattccaatggtattaatcttcagaatgtttccattcaattacccttaaggcaaattgatttaaatacagtaaatactaatattaaaaataacgataaatggggttatcttaccaactgttctactttcgcttcaaaaatttggaattcaattgccagtagcagcagtaaagttgacgctggggccatcaatacaccagccagtctagcaaaaaatattacaaaagttggtgaggcagaatcatacacgttgttaaaatacaatacttcttcaccgcattacgattccgtatattatggttatccgcccataaagagtaataacaataattagataaccaaatctgcctggtaaatccagactagttttatctagaatgagccgcaagtttggcatagcgcttgcggctcatacgcacgatagcaagagccgcagcattcccacccggtctcaagcccatgagacacttaggaccatgactaccattatcatgcgcacctccgaaggtgacatcaaaatcaacctgttcgacgacgaaaccccggaaaccgtggccaatttcctcggccttgccaccggcgagaaggaatggatcgatccgatgaccggccagccttcccatgagccgttctacaacggtctaaccttccaccgcatcatcaaggatttcatgattcagggtggctgcccgctgggcaacggcaccggcggcccgggctacgacttcgacgatgaaattgttcctgatctgaagttcgaccacccgtacctgctggccatggcgaacgccggcctgcgtcgtggcatggacggcaagatccacggcaccaacggttcccagttcttcatcaccaccgtgccgaccccgtggctcgacggccaccacaccatcttcggcgaggttgcggatgacgattccaaggcagtggtcgacaagctcgaagccgtgaacaccgatcgcatggaccgtccgaccgagccggtcggcatcgtgtccgtggaagtgctcaagtaagcgtttcccgcacagccgtacaatatagggaagcccctcgattgaggggctttcttcattttatttatagaggcgtttgcttgcaatcaccggcttatgtgattcgtcaacatcacattttgcgcagtcgcggctccgcggaatccttcgcgccggtgatgcggtacacgtcgaacacgccttcgattttacgcacggcggcgagcagagtgttcagatgctgcggatcggccatttcgaagctgaattggctggtggccacgcggtcggtgccggtggaaatcgagccggagataatgttcacgccgtggtcggacagcacgcgtgtcacatcgctcagcagatgcggacggtcaagcgcctcgacctggatcttgaccatgaacacgcccttggtgctggtccactgcacatccaccacacgttcgggctggcgtttctccagttcgagcatgttctggcagtccacgcgatgcacggacacgccttggttgcgggtgatgaagccgatgatcttgtctccaggaaccggcatgcagcatcgggccagcttgacccagatgtcccccacgcccttgacggagatacccaacgagctggtggtcttcttggtacgctccacctgcttgagcggcaacgcctcctgctcgacttcctcatccacctcgtcgctgcccgcgtcacggaccagatgcgagatgacgttctgcgtggagatctggccatcaccaatcgccacgaacacggcttccgcgttggcaaggttcaactcgtcggcgacgcccaccaatgcttccggagtcagcagcgtggtgattggcaggttgcgcttgcgcatggcgcgcgtcagctcgtcacggccttcctcgacggcttcggtacggcgttccttgctgaaccattgacgaatcttgttgcgtgccttcgggctcttggcgaagctcagccaatcacgcgacggacatgcggattcggacttggatgtcaatatttcaacggtatcgccattctcgagcttggtatcaagcggcaccaatcgtccgttcacgcgcgcacccatggtacggtgaccgacttcggtgtgcaccgcataagcgaaatcaatcggagtggcttcggcgggaagcgagacgatcttgcctttcggcgtgaacacgtagacctctgccgcgcccaaatcctctttgagggagccaaggaattcgtcggaatccggcgtttcgctcgtccagtcggcaagttgctgaatccatttgaggttgtcggcctcgctcagctcctggttttcgccacgcttgcggtcggacttgtcaggcgagctcaacgcgcgtccggcttggccgttctccttgtacttccaatgcgcagcgatgccgaattccgcgcggcggtgcatgtcccacgtgcggatctgaatctccaccggcttgccgccgggaccgaccaccgtggtgtgcaggctctggtacatgttgagcttcggcatggcgatatagtctttgaaacggccgggaacagggttccaccgcgcatgcacggcacccaacgccgcatagcagtcctgaatcgtgtcgacgatgatacgcacgcccaccaaatcataaatgttggcgaaatcgtgcccgcgcacgatcatcttctggtaaatggagaagtagtccttcggacggcccgtcacataggctttgatgtgctgttcgtcgagatcctcattgatttcggcgagaatctgcttcaggtacacgtcgcgttgtccggcgcgacgggccaccaataccacaatctcgttgtagatcttcggatacagaaccttgaagctgagttcttccaactcggttttgatggcgttcatgccaagacggttggcgagcggcgcatacacatccagcgtttcacgtgcctttttctgcgcattcgactgcttgacgtaacgccatgtacgggcgttgtgcacacggtcggcgagcttgaccaccagcacgcgcacgtcgcggctcatcgccaccaccattttgcggatggtctcggcctgggcggaatcgccgtattccattttggaaagcttcgtgacgccgtccaccaggccggtcaccgtgtcgccgaattcggcgcggcattcgtcgagcgtgtagtcggtgtcctccactgtgtcgtgcagaaggcccgctgccacaaccagcggccccatgccaagatcggcgaggatctgcgccactgcaagcggatggatgatgtacggctcgccggatttacgccgttgcgacgaatgctggttgacggcgcgccggtaggctctcgcgagaatgctcatgtcctcgtcgggatggtggtattcgcacatcttgaggattggttcaagcgggtcaagcggattcgtgctgatctcgcagcccaacattctggccgaacgaacctcatgatccatgtcgctcatttcgctcctcctcgcttggaatgtaccctatagtacccgcgcatcaccatatgacggatgtatccggccgcgtgttgcacggccggatacatcctcggtctttgtgtattgcagtcccgtcaggacgcaacgccggttgatccgaagccacgttccgcgcggtcggatccgggcagggtctgcgcctcgatgaattttgcctcgacgtagcgttggatgaccagctgtgcgatgcggtcgcccggatggaacgtcacggcgcgttccggatcgaggttgatcaacggcaccttgatttcgccacggtacccagcgtcgatggttcccggcgcgttaagcaccgtgacgccctgcttgacggcgagtcccgaacgcggatgcaccagcgccacatagccggcaggcaatgcgattgccactcccgtgggcaccagcgcccgctggaacggcttcaacgtcacttcttcggtggtgcgcagatcggcaccggcatctccggcatgggcgtaatgcagctgagccggctgcccgggatccagcgactttaccagaacctcgacgttttccggctcgttgtatgcctcgtcgaacgccatcaggccgcacactccttgcataccggctgtccgtcgtcggtagtgtaggcaagctggctgcgatgcttcaccaggaagcattcggagcagatgaactcgtcgccctgcatcggaatgacggtcaccgaagcgtcctcattgctcaaatcggcgcccggcagctcgtagtcttcggcaatggcgttctcgtcatcgtccatatcgttggaattgttctgagaacccttgctcaaagcctggagcgactcctcgtcctcgtctttgttgcgcggggaatcataatcctgtgccatcgagattcctttcgtcatctatggtgcttatgcgccatagaatacatgacttttcccccgctaggatacacgaattgaaatactcgtaaaatccgacacgtggggcacaatagaattaatagaaaaatctaagggaaagtggtgtgttgtgcctgagaatgcgctcgaagatgcacggttcgatcatgtgagtgaaaccggtgagctcgtctttgtttcaggtgccggcaaattcgccgtcaaggtcgatgaagcgcttgaaagagccattttggaggcaaaacagattcgcaccgaaacccaagaggagcgtcagcagcaagcgccttccacgctgccgatctcccaaatccaatccttgattcgagccggagccaatccgacccgcgtggcggagcgatattcgttgagcgaagcgcttgttcggcgtttctcggcggcggtggaaaccgaaaagcaatatgcgatcgaacagttcctggcggttcccgcgccgaaggaaagccgtgtgcgcacgctttccgaactgatcgaacgcactttcgccgcagcccacgtacggttggaggatgtgcggtggaaggccaccagacgcggtttggaaccgtggaagattaccgcggagttcgattccgcaggtcatgccgcccgtgcggaatggtcttggaacatgcatgacaacgcggtcaactgtctgaacgcaacggcacgcaagctcatcggcgagcaagacacgcctacggaaggacacgccgagaagcaggtcgaccagaattttctcgcatcattgaatttgccgggcgattccgcacgttccgcacgtatcgaacagacggtgtccgcttggaatgctccggaaccggttgcaccacaagccacgaatatcaagaccaccgttgagactcagtcatcggcgaccgttccgctgccgaaccgtccggaaatcgcgacgacgcagtcccccgccccttcaacgacggaacctgcccaaaactcgcaaaacacgcaatccgccggcgagcagcagtccgataagtccaagacggcatcatccgatcctcatagtcagagcaccaccaaatcgaagcgccgtgcaggacgctccgcagtgccgagttgggatgaaattctgttcggtgactgattaacgttccctaacatcccacggcaacatccgttcagacgttcggatcattcgatcaagccacgtcaatcaggcatggaatatcagattccatgtaggtcagcgacccgtgcacgctgggcagatgcatcgccttctccgcctgtgtgcgggaatcgacaatggtggtagagcccgcagcggagacgaccacatcgccgatcatcgacttgacgcgttcatcgactggtccgtagacgccttcctcgattgcctgccggcgggtgcgcacctgggcgcgctcccccagcacgtcacgccaacgagcggcgatgtcctccggattctcgccatcctcgccataaagcatgacacagcgtggttcgccgccgacattcgcgacgccccacatcagctggggttcggacgctatgtcgatgcaggcttccgggtcggcggttatcatgccatgatccgccacgatgacgatcagcgtgttcttcggcacacttcgacgcagcaaagacaactgggcgtcgatacgctcatatgtgccgatccacttgtcggagtcccagccgtaattgtgtccgatcttgtccgcgtcgcgcaggtacacgtatgtcagtccgggcgtgttcgccgctttcgccgcggtcatgatacgtcggcgtggatcgtcattggagatgtagtcgctgccacgtaacgccgcctgagtcaacgcggagaacgcgaatttcggcagtcccgaactggtgacgcgaacgtcctgttccgccaatcgttcgaatatggtcggctgctgttgcagtttcagcggtgcgggcgcgtttttgaaagagatgagctggcagatttcgccattgtcgggattgagctgcgtatatcccgtcatgccggttaatccggggcatgtgccggtgccgaacgtggacattgcggccacggtggtgctgggcatgcatgtggcgattggccgctggttaacgccatccgccatcagcgaccgtagatagggtgaatgccccaatctcatattgatgttccaatatccgagaccgtccaccaggaccacgactgccgaacgcgcgtccggcaggccaagtgcctcttggagtcgtttcggatcggcatggatggccgttggaatcggatgcccgatggcgctggaaatggcgggaagtaccgaggataggtggagagcaccgccgcggccgccctcatccggcagttcgtcgccatatcgtgccggactggtcatggctagcagctggtcgatttcgggcacttcaacactcatggttcccattcaagcaccgcggcagtaccagctggtaatattgctaggttgattaccataacctttccgtgaggagaaccaccgcatggtgtcgcaccgcaaaccggcaaaaccagcctttgacccgcgtacggtcaaggagaacatcgtcgaaacgccgttgaacgaggaaatgagcaagtcgttcctcgaatacgcgtattcggtgatttacgcccgagcgctgcctgatgccagggacggtctcaagccggtgcaacgacgcatcatctatcagatgggtcagatgagcctcaatccggaccggccgtatatgaagtcggcgcgtgtggttggcgaagtgatgggcaagctccatccgcatggcgattccgcgatttacgaggcgatggtacgtttggcgcagccgttcgcgatgcggctgccattggtggacggtcacggcaatttcggttctctcgatgatggtcctgctgcttctcgttataccgaggctcgtatggcgccggccgcgttgggcatgaatgccgatatcgccgaaaataccgtcgatttcacgccgaattacgataacaagcttcaggagccgactgtgctgcctgccgcgattccgaacctgctggtcaatggtggttccggcattgccgtcggcatggccacgaatatggccacgcacaatcttggcgaggtggtggctgcggccaagcatcttatgcgccatcccgacgcgacgttagaggagttgatgcgctacgtgccgggtccggattggccgggcggcggcgtgattgtgggccgcaagggcatccgcgaggcgtacgagacgggtcgtggcgcgttgaccacgcgttccgtgacgcatatcgaaaacgtgacggctcgcaaaaaggccatcgtcgtgacggaactgccgttcatggtgggtccggaacgtgtgttggaacgtatttccgaaggtgtgaagaaccgtaagctggacggcatttccggtgccatcgatttgactgaccggcataacggcacgcgcctcgtcatcgaaatcaaaaccgggttcgatccgaacgcggtgttggcgcagctgttcaagcacacgccgttgcaggacaatttcaccatcaacaatgtggcgttggtcaatggccgtccgcacaccatgggattgaaggaaatgcttcaggtgtgggtggaccatcgtcgtgtggtgatccgccgacgcagtgaattccgcaggaagaaggcgcttgagcggctgcacttggtggagggcttgctgctcgccatggtggacatcgatgaagtcattcaggtgattcgctcttctgatgatgccgaggccgcgaaaacaaagcttatcgccgtattcgatctggacgagattcaggcacagtacattcttgacttgcggctgcgccgtctgaccaagatgagtcgtatcgagcttgaggcggaacgcgacgatctgaagcggcgtatcgaagagcttgaacgcattcttgcttccgatgaggcgcttgacggcgtggtcattgacgaaatggatgacgccgtggccaaatacggcactccccggcgcacggtgctgctggatgaggatgaggaaggcaatttgacgcctgttgtggcgcatggcgatgatggcgtctctgcaaacgcgatggctgccgcgcgcgccgccgcgaccgtatcctccgcagcagccgatgtcgccgcagccgcaaaggccgcaaagaaggccggcgatgagaatgccaccgcatcggctctgcagattgatgacgagccgtgcgcggtgatgctgtccgccacgggcctgatcgcacgcacttccgaggatgcggtggaacgttgggagaatcgttcggcttccgacggacgtgccaaggatgatcagatcgtttcgatgttccgcacgtccacacgttcctcatacggcttggttacttcagcgggtcgtctggtgctggcccatgtggtcgaattgccgaaggtttccgcggatgggccgctcagtgtcacgggtggtgtgaaggccgaggaactgctgggcatgacggagaacaccgatccgatccgcggcgaacgggtgattgctgcgattgatatgccttccacggatgacggcggtcagcttgttcctttggcgttgggcacccgcaacggcgtggtcaagcgttggaaccgtgaatctccgaccacaatggattcgtggagcgtcatcgatttgaaggatgatgacgaagtgcttgccgctgccgaagcccgtgatgaggatcgtctggtgtttgtgtccaccgattcctcgttgttgacgttcgaagcgaagaatgtgcgtccgcagggccgtaccgctggcggcatggcgggcattcgtctggctgaggggtgttcggtggccgcgttcgcggtggtgcctgatggcaaggtgacatggaattacgaagaaggcgagaatggactgttctctgcttccggagccgtggtgttgacggttgccggcgattccgaagcgttgcctggcactgaaaacggtgccgcgaaggtcacgccgttggagatgtatccgacgaagggccgtggtacgggtggcgtgcgttcgcagcgattcctcaaggggcaggatacgttgattctcgcgttcgtgggcgcgtatccgttgcatgcttccacgcaaagtggcgctcctgtggaattgccgaagcctgatatgcgacgcgatggttccggtacggatctgtcggcgccgattgcggtggtcggctgattcgacgaaatcgattggcggggctctggactggttcttcttccggttcagggccttcccgttttgcgcacttgggccgccaggttgaatgagcaggctgggtgaaagtgcctccggcttggttcagccatatagcttcatgccttgtgggctgtccacgaacccggcagcatgcagcaaacgtctgtattcgttgcgttccttcaatgattcaccgttcatttcggcgaagctgacgctgcccttggactgatgctgcaatgcataggcaagttccgtacatgccggctgcaatattcgctcgtcatcggtgaagctgacgattctgtggcttttcggcacggcaaacagcaccggcatgccgtggtcgagcacgatgaccgattccgctctgcgcgccggtttcatatggtgttgttcgggccatgtgatcgcggagcctgtcaggttggccgggtcggtcacgtcgagcgccacgcaggattggctgcgcgcctcgtcgtcgccgcgcaaggcgtccactgtgtcacgtccggcgaattggaccgctccgaatcctttgacgaacatgcctctgaccagattgccgtgttcctccatacgtttgagtaccgggtatagtccggagaatccgcctgcgacctgctccttgtcgattagcggagcggcgatcacgccatatcggtcgagcagcgattcgatcaatgcgatgtcgtattcctcgatgccggctgttggtttgccggcggtatcgtccgcttgatccggtatcgccattggactggtccgggacgagtcgaccgcggaccataatccaccgagcgtcgccggtgtcgaggcgtggatccgtacgcgtctgcgtgcggcagtgcgtggcgcgcgcactgaaaccgtgccttgagtcaaggcccgaacgggagcgaatgaactgttcgtcactttgccttgccataccaaggaccacaaggcttcctcgaactggctttcgccccatgcgggaaggatgatttcccctgtttcaggattcacgttgacttccgcatgttcctgccagatggctttggcggctgtggaaagctgccgcgcatggaaggctcccccattcgataatacggcaagtatcgtctccggcacggtcatggttccggcactataggcattgttctgcgattgttcgccgggtttcgtcagcagccgtgaatcagctggatggaatgcgatgccgccggcttccttggcgttggaaccattgattttggagccgacccataccacgtctccggatgcgagcaattcgtccaacatactcggttggtagtcgcgaacgcgtgcggggaagaccgaggattcccaaacggaggcgttgaggtatatgccttcaagctgttcgatcacacgcatcagcccgtcgacgctttcatatcgggcgccacccacaggtccgacaccttgtctgtccaacaggaacgcctgatagacggccggttccaccggcttgatggctttgcgtgccttggcaagcgaaagcgcgcggatacgccgaaacacgtctttgtggagccattgctggggcgtttgccgaggtgaccgttccgatgctgaatcatcggaaccattggcgtccgctccggccgcatcatcgacgaaatggcctttcagcagttcgcctttggcatgtaattcatccaacatgcgtacgccttggacagcgtccaatcccagttcggcgatcatctgatccgcggtgaatgggccatgcgttttgacatatcgcgccacacggccggcaatgtcggtctcgtccaaatcgttccagaacgtccgtccggcaagctccttcccaacctgcgcgatgacgtcggcatccaacagcgaagccatgtccgtggctcccagaagacgttccagcacttccgggtccatggacagcagttgcgtgctgcgttcggcttgcggcacgtcgtattggtacatgaccgcgcccacgtatccgaacagcatgttttccgcgaacggcgacggcgtttccgtgacggtctcgctcaaagagatgacgccggagcgtaatccggacatcacatgtttcagcgcgggcagatcgtacacgtcctgtaggcattcgcgtgcggtttccaacagcaacgggaagttcttccgagttcgggcggcgttgagcagttgcgccgcgcgcagccgctgctgccataaggggacgcgtctgccggggttggcgcgtggcaggaacagcgatcgcgccgcgcattctcggaatcgtgcggcatacagcacgctttcgccgacttgcgtttcgatgatgcgttgcagctcttccgtgtcgaacagcagcagctcgcggatcggcaggttgccgtcgccgtccgggaggcggatgatgatgccgtcgtcggccgcgtatacctgcccatcgaacccgtatcgttgtttgatacgtgtggtgatggccatggcccatggttcgtgcacgcgtctgccgtatggcgagtggacgatcacacgccaatcgccttcttcatcctggcagcgttcgacgaccagctcacggtcgttgggaatcgttcccgtggcggcgcgctgttcggcaagcaggtcggcaagattgccgatggcgttgtcgtccaatccgtcacgacgtagacgtgcgattgttgtcgtgtcgaatcggctggtcttgtctcctgcgatgccgtccgagacttccgcgcgtagtccttgcgccatatcgcgtatgaatcggccttgggaccgtccgaatgccgcgtcccgcccgtcgccttcgccatgccagaacggcagtcgggcggtacgccctggagcaggaaccaccaccacacggtcccgggtgatttcctggatctgccaggtcgatgtgccgagggtgatgacgtctccaacccgggattcgtacaccatttcctcatccagctcccccactttgcgtgggcccggtccggagccttcttcgggaagcaccacggtgtaggttcctcggtcgggtatggtgcctccgctggtcacggccagtcgttgagcgccagggcgcgcggagatgagacccgcctcttcgttgtattgcaatggaggtcggaaggcggagaaatcctcgccgttgtaggcaccggtcatcatgcccatcacagcatcgaacatggttctgtcgagatcttcgaatggcgcggccttgcgcacggtcacgtaccagtcgtctggtttcagatcatccatcgccgcggcggcgacggtttgctgggcaagcacgtccaagggggtgcatggaatggtcagtgtttcgatgtctccggagcgcatgcattcgatgcttgcggccgtgccgatgatttgctctcgtgtaatcgggtagaacagtgcatgcgagactcccccgaccttgtggtcggcgcgccccacccgctgcaatcccgaggacacggacaatggcggtgcgatctggatgaccagatccactgaacccatgtcgatgccgagttcaaggctcgatgtggcgaccacgcaacgcaattggccgcgtttgagctgctcttcgatctgtttgcgccggtctttggaaacggaaccatgatgcgccatggcgatcgcgtcggcgtccgcatgcgaggagaccagcatggtggtggatccgaccacggaatcgtagtgtttggcgaagccttcacggccttccggggagcccagatccggatacggctgggtggaatcactggctgtggactccggctgggatgcgttgtccgacacactcaagtccgttcggccaagcctacggtcggacagcgcatcccgccctgcgtccgctttgacggcggtttcagacccagttttccgggatgtgcgcaattgcgcatacaggtcgttgagccgtgcggtgagtttttccgcaaggccacgggagttgacgaacacgagggtggtgtggtgtttcagcacttcgtcaagcacgctgcgttcgatggccggccataccgaacctccggtcgaaacccgtgaggtatgttcatctcccccgaccgaagtcagtcctttacgttccgccaatgcctccatggcaggacccaccccggaaatatgcgtggtatggcggttcggaagtttcacggcgcctgccctccgccctgcgtcgtcggagacgggatcgcgcatggccgaaagcggttccaccactttcagatccatgtcggggtgcgattcgggtctgatgacgcgtaccggccgcgtgccgccaaggaaacgtgcggcttcggccggcggttccacagtggcggaaagcccgatgcgttggacagaccggccggcaaggctttccaatcgttccaagctcagcgccaggtgcgcgccacgtttggagcccgcgatggcgtgcacttcatccacgataacggtatcaacggcggaaagtatccgtcgcgccttggaggtgagcagcaggaacagcgattctggcgtggttacgaggatatccggcggatggctgacgattctgcgccgttcctgcggcgtggtgtcgccgcttcgtatgcccacgctgactttcggcgatggcaatcccatcgcctcgcactgtccggcgatgccagccaatggcgcttggaggttcttggccacatccacgcccagagccttcaatggcgaaatatacaggaccttgacgccgcggacgggtttacgtttcttggcattgcaatcggattcagccgtgccgtccccaccgccggacgtccgcaataagtcatcgccctccttcgtcatcagacggtcgattgcggaaaggaaggcgcacaatgtcttgccggagccggtgggcgccaccaccaacacgttctcgccggagcagatggccggccatgccaaacgttgcgcctccgtcggagcattgaacgcatgcttgaaccaggcattggtagcctccgagaacaagtccatgcattcgtacatacgttcgattatggcatcgccttcagacatcatccacaaccggcggaaagctcgtcatccaccgtcgtcggctcattcgagcacaccgcccggctgacacattcgagcgtctcacatatggcgtcgtcaggcggccgcacggtcgccgcacttgcggcgcaaagtctcatgcatggcgaccatcagcgccaggaacaccaccagatagaacgggaacaggttgaccgaaacatgttgcgcgatcagcccgaacagcggcggcatgcacatcgatcccacataggcgcaagccatctgcatgccgacgatggcctgcgatttgtcctcgccgaaataagcaggagtggaatggatgacgcacggatagatcggcgcgcagcccaaaccgatgaccattagtcccgcgatggtgccgatattgtgcggcaacggcaggagcatgatgacgatgccggtcagcaccaacgcctggccaagacgaatcatggccggatcgttcagtttcatggtcaggaaaccgctggcgagacgtccgacggtgatgccgatgcaaaacaggcttccccacatggccgccgtggtcttgtcgatgcccttgccaagcgccatatagctgctggcccacaacatggcggtcgattcgagcgcggaatagcagaagaacatcacgaggatctcgcgggcgccacggatggcgagcacaccgcgaataccaagcggcttgcgccggtcagccgtttccccttccgattgctcggactgcgcggattgcacggaagaggtttcactcgtccgctgcggttcgacggtcttacgcgccttccacaacggcaggctcagcaccagcaccgcggtgagcacgacctgcagaatggagatggtccggtagccccacgcccaaccatggccggcacccaatgcgcttgccatgatgtacgggccaagcagagtgcccaagccccacatggcgtgcagccagctcatgtgacggctttcgtagtggattgccacatagttgttgagcgccgcatcgacgccgcccgcgcccaagccgtacggaatggcgaagagcagcagcatccagtaattcggcgagatggagaagccgaacaatgcgaacgccgtcaacgcaacggacactgccgtgaccttgcctgcaccgaaccgcaaggtcatgcggtcggatagcagcgcggacacgatggtgccggcggaaatcgtcatggaaatgccacccgcccaggaaatcggcgcatgcaggtcgccgctcatcgtcggccatgcggcgccgagcaccgcgtccggcagacccagactgatgaaggcgatgtaaatcacggcgagcagcaaattggccacagtcagctccttgtatgttttatgtttgcggcaataaaatcacgaaaatactccgctattttatccaaagttacctaccaaacggtattttgtatcttgcactatcgaccgacgtttttgcattatcgtgcatacacgaaaagcgggtctccgccgtaacgcaaggcccgccaatcgcaatcgccatgcaatatcaggtgtcgatcttggaacggtcgaaatcgtcggcgttctccacgatgaacgccttgcgcggcggcacgtcatcacccatgagcaggctgaagatgtggctggcctgttcggcgtcctccatgcggatacggcgcagcatgcgggtgcgcggatccatggtggtatcggccagctggtcggcgtccatctcacccaaacccttgtaacgctggatgtcctcgttgtagccgatgtgctttttatcaagctcggcgagtttgcctgccaactcatcatcggaatacgtgtagatgtactcgcccttatgcgtacccgtcaacgcgatacgatgcagcggcggcactgcggcatacacatgaccgtattcgataagcggccgcatgtaccggtagaacagcgtcagcagcaggatgcggatgtgcgcgccgtcgacatcggcatcggtcatcatgatgatcttgttgtatcgggcctgttcgatgtcgaagcttgcgccggatcctgcgccgaccacctggatgatggctgcgcattccttgttggacagcatctgcgcgagcgatgccttctgcacgttgaggattttgcctcgaatcggcagcaacgcttggaaaccggaattacgggcggccttggctgtgcccaatgcggaatcaccctcgacgatgaacagttcggccacatcgtcattgccgggctggcagtcggacagtttcggcggcatggacgcggattcaagcgcgttcttacggcgtgtgacttccttggtcttgcgcgcctgcacgcgggcatgcatttcgccgacgattttctccagcacgcggccggactgttccttgtaaccgcgtttggagccggtaatcatctcaccgaactgcttatcggtcattctggagacgatcggcttgacttgcgcggtgccgagcacgtccttggtctggccttggaactgcggttcggcgatgcggacggtgacaacggccaccagaccggcgagaatgtcgtcacgttccaccttcatatgggaatccttgagattcaccttgagtttgcgcgcgttgtcctcgatggccttgcgcacctgcttggtgatgccttggaggaagccgtccacgtgcatgccgccgccgggcgtctccaccacgttgacgaagctgcgcatggtggtgtcgtagccgttggtccatcgcatggcgatatcgactgcgcaatcacgcgtcaccttctgcgcatgcagttcaccatcgtctccgaccgcctgcgtttcttcaacatacgtgtcctcgccggcgatgcgccaaatatcggagaccgcttcgcctttggacaggaagtcgacgaaatccttcacgcctccggtatggcagaattcttcgacgcgcgcatgcggatatttcggctgcacgggctgggaaacggtttcctgcgattgcgtggcagcatcgttttcttgcgattcggctgactcatcagcttcggctgaatcctcctgcagtatgtcggcagaggttccgatatcatccgtttcagcggacgtgttctcttccgtcacctgttcgatgacattgtcatcgacttccagcatttcgtcaatggactcgtcgccggtttcgggaatgttctcgtcgatgacggtgattttcagccctggcaccaggaaactggtctgccgtacacggtcgatgagctggtcatagctgaattcagcggtgtcgttgaaaatctccggatccgcccaatagcggatgcgggtacccgtggtcttcggactgactttgccgatgatctcaagttcggtgggacgattcttgcgcgtcttcttgaatggcgaatcgggagacgggtgttccggatcaacgtcggaatacactccggggtggccctgatggaaagccatgtggtgggttttgccgtcacgatccacttccacgtcgagacgggagctcaatgcgttcacaacggatgagccgacaccatgcagaccgccggaagcgccatacgaggaattgccgaatttggcgccggcatgcagcttggtcagcaccacttccacgccggtgagcttggttttcggctccacgtccaccggaatgcctcggccattgtccgccacttcaacggaaccatcgtcatgcaaggtcacgatgatgtggttgcaggctcccgcaagagcctcatcgacggcattgtcgatgatctcccacaggcagtgcatcaggccctggctgtcggtcgtgccgatgtacatgcccggacgtttgcgcaccgcatccaagccttcgagcacggtaagactctcagcaccgtaattatccttagccatgttccctttcaattgtcgccttacaagacatgaagtcgagaaaccctgcgttcatgccggtttctcgacttcatttactcgcgtctgattactatcactggtccaggaagtcgcgcagcgtctgcgaacgggacggatggcgcagcttggacatggtcttcgattcgatttggcggatacgttcgcgcgtcacgccatacacacgtccgatatcatccagcgtcttcggctggccgtcctccaaaccgtagcgcatcttgatgacgccagcttcacgcggagacagcgtttcaagcacctgcttgaactgctcctgcaacagcgagaaggcgacggcatcggacggtgcgatagcgtcggtgtcttcgatcagatcaccgaactcggaatcgccatcctcgcccagcggcgtgtgcagggaaatcggctcacgcccgtacttctgcacttcctgcaccttctcgaccggcatgtcgagctcgcgggccagttcgtccggcgtaggttcgcggccgaggtcctgaagcatctggcgctgcacgcgggacagcttgttgatgacttccaccatatgcacaggcacacgaatggtgcgggcctgatcagccatggcacgggtgatggcctggcgaatccaccatgtggcgtacgtggagaacttgaagcccttcttccagtcgaacttctctacggcacgaatcagaccaagattgccttcctgaatcaaatcgaggaacagcatgccacggcccgtatagcgcttggcaagagagaccacgagtcgaaggttggcttccagcagatggtccttggcgcgcttgccgtcgttcgcggcccacttcagttcacgccggcgcttgaaatccatcttgtcggattccgtgtccagcagatgttgggcgtacagaccggcctcgatgcgttcggacaggtcgacttcctgttcggcgttcagcaggttcactcggccgatctgcttcaggtaatccttgaccggatctgcggtggcgccggctgcgatcacacgacgcttcggattgccggacggcgtcagattgtcgtcgtcatcatcgtcacgcaccacgaaagcgcctttttccttgggctcttccggctttttgcgcttgtcttcgtcatcgtcttccagttcggaatcgtcatcctcgtcgatattgtcctcgtcgaggtcgtcatcctccccttcgtcgtccacgtcatcaaggtcatcgtcgaaatcatcaagatcggcatcctcgacgggatcgtcttcaggagcgtcctgctcgatcaggttctcttcttcttccgctttcttgcttttcttggcggcggaggtcttcttcgcggccgtcttgcgcgacgtcttcgtagcggtctttgaggactcgctcttcttggcagcaggcttgcgcgtggaggccttttttccggaggtggtcttttcggtcagatcagtctgttccgtatttaccgtcgtttccttggtggccaaacttatcctcctattgatcccgccggaagcgtataccatatggacccacttctggcaagggcaaatcgtcaactatgtgagttaaccatcttgcgaggacgattattcccgcgtgttgagctcaccatgcgcaagtaccgcttcctttcggcgtgttgctctatgtctcttcggcccatgccggtccgatatgacgatgcgccgcggagcagatgatcgccgcgagcgaacaattctcatccaacgcgagcgcacgcatcgcgcacagcatggcgcgctcatcgcccatccaccacagcacataactgatgatggccaatggctgcacatgataccgttcggggaccatcccgatgatgtcgaacatcatgttgacgccgttgtcgcaacgtttcgtgtcgggttttcttgatgcgtcacggaacgatccgttgagggattcctccagatgacgcgtgttgccgggaagtgtcggattggccatgaatcccatgagaaagtcacgtgacgaacgtcgttcatccacgatgatggagaccagcagcgcgtcacgcaccgccatggtctgctgcatggcgatggcaagtgctcccgcaccgtttctggacagtctgcattctggcgatgaatcgtcacctcccgacgattcatcggccagctcatccatccattccgagaatggctcctgcaggaaatcgcgtatgctctccgccatgcccagcgatttgcaatcctccaccaattggtcttcaagccgttccatctcggcttcgcatatcggcatgggctcgtcgatcgtcttcatgtctcgtcctccttggcgtatcggagcggtcgcttgatgcaggccgctttgttggaactatgcatcatccggcaatgcaatgaggcgtttcggcacccctgtggtcggagaacgtgaagctcggcgtgtcacgaaacgtccggcaccgtctcacccgctgcaatcattatgttttcctcttgtcgaatgtgtgtggataaccttgacccatgactagctcttccgatttggaacagattgaaacgcgcacgctctcgctggtaagggatttttcgttcctgcatgcggacgatccggtggcgaattcctgcaaagccgtcgctgatgcggtggcgcagcaggcggtcacgtcaagtgagggcggcaaacgtctgcgggcgttgctgacgttggatgcgttccgtgcgttcgcgccgcaggatgtggcggaacgtgatatggatgcggtgttggatctggcatgcgcgatcgaagtgtttcagaccggcgcgttggtgcatgacgacatcatcgacgattccgatctgcgccgtggcaagccgtccgctcatcgtgcgcttgccacggatacccatagtgatgccatcggccatggtttgggcatcatgttgggtgatatgctggccaccgcgagcgtggatatcgccaataaagcggcttgccggcttggctccgggtcttccgtggtgtcggccttcctgaatatgcaccgtgaagtggaaatcggccaagtactcgatttggccgtggaactcaatacgttagacgatcctgaagagctggcgtcggcctctttgaatgtcttccgttggaagaccgccagttataccactatcgcacctttggaattcggtatgcttgccgccggcctcgcccctgcggacgcgcgcaggctcgcactggcgattggattgcctcttggtttggcgttccagctcgcggatgatcttctggacgtcatcgggtcgagccgcaataccggcaaaccggtgggcggtgatatccgtgaaggcaaacgcacggtgttgctggccgatgcgattgaggctgccggcgatgtcgaacgacgtgaactcatcgacatgtgggaagccgaatcacgtgacgaggcacatgttaggcgtgccatcgcattgttcgagtccactggtgccatcgcacgttccaaggaacggatcgccggtctgtggctcgagtcgaaggccgccatcgagacgcttgaactatcgcaggatcgcaaagacacgcttaccgaagcatgcgcacgtttcgtaccgattgtgcgggaacagggctgatgccaccgcactgtgaaagacccgtgttcatcgcatcttccgcaaaccattccttgtagactacaagtgaacacatctttgtcgcgaaacgttttttgaagaaggaatcgtaccgattagccatgagtgaagcccagcatgcccccgaaggccaggtcatcgaaggccggtaccgagtcgtcagcagaatcgccgatggcggcatggccacggtgtatcaagctgttgacgagcgtctgggacgtaccgtcgccattaagatcatgcacacgcagctggcacagggcccacaacgcgaccagttcgtggaacgtttccatcgcgaggcccgttccgcagcagcaatagccaatccccatatcgtgcaggtgtatgacaccggtgagttcgatggactggattttcttgtcatggagtacgtgcatggcgtgaacctgcggtacgaaatgaaccagcaagtcacgttcagcgttcgtgagacgctacgcatagtcggtgagacgttggacggcttggcttcggcgcatcgcgcaggcgtggtgcaccgcgatatcaaaccggagaatattctgctcaatgaccgaggacatgtgcagatcaccgatttcggcctggccaaggcggtgtcgcaggccacgctgtcctccaccggcatgctgctgggcacggccgcctatctggcgccagaaatgattcagcacaatcaggcaacgccgcagggagacctgtattccgtaggcatcatggcttgggagatgctggccggcaaggtgccgttcaccgcggacaatccggtgacgctggtgttcaagcacgtgcatgaggatgtgccggatatcacgaccgcttgtccgggcatcaatgcaggcgtggccgcattcctcgcccgtcttacggcgcgcgcggtcgaggaccgtccccaggatgcgtccgtggcattcgacgaattgcagcagttgcaatcgaacctcaccatcgacgactggcaataccgtctgtcagccgtttccccggccgcaaacgatgccgccgacaccatgcccggcgatggcacccggcagatgccgctaccgcccgctcccccagcaccgcctgtgcgtcagaacgacgatcgtacacgacagttcaatccggaaaacccgaacaaaaccaccgtcatgccggcgcagcaggcagatccggaggcaaccacccgcttggctttggaaaagaacgacgtccccgccaacaacgttccagcttccccctcgaacggtccggtcagtggtggacagccgaaacgcagtggcaagcgtgcacctgtcatcatcgccgtcgtagcagccatcgtgcttgcctgcgcaggcggtggaggctatgcctggtggtatttccgaggaccgggcagctactggaccatgcctcagccggcagatctcacatgttccgattcggagccctgccgtatttccaacatcaaatggaacgcctatgaggaactgctgaaattctccaacatcgagtacgaagagaccgaggcgttcagtgattccgtcaaggctggcaatgtcatctccaccgacccggagaatgtcggttcgcatgtgagcaaacgtcatcatcagaaggtcaaggtggtagtgtccaagggtattaagcagggcactgttcccacagacattctcgatgccaccagtgcgaacggcaaggatccgatcaacgcgttgaagcgtgccggcttcgacaacatcgaacagactccggccaatgatgacgcgtattccatggacgtacctcagggcgcgttgcttgatttaagcgtggatcccggcgcgactctgccccataacgcgaagattaccgtcacgctgtcccaaggaccgaaaccggttaccatgccggacgtcgtgggcaaatcgaaggatgaggcgcagcagacgcttgatgcgctcaagctcaccgtcaactggaccgagcaattcgatgacaagattccgcaaggacaggtgatttccgcttccgcgaagaccggagacgagttgcactggggcgatagcgtcaatgcggtggtgtcgaagggaccggaaaccgtaacgctgccgaattatgtcggacagaaagccgccgctgccaaagccgcattggagaagctgggattcagtgtgaagatcagctcgcaactgacacttgactccagtcaagacaagaaggtcgcttcgcaggatccggtaggaggcaccgaggtgcgactgcgtcaggaggatggcacgccgaataccgtcaccttgaaaatgtattcgtcgctgttcgactgattatcctgattccaataccaatcaggggtgtctgttccgaaaacattcttcggaacagacacccctgattggtttggaatgaacctcgctgaaaacttatgccttcttggcagcggattcggcttgtgcctgcgcttcggcctcctgctgggctttgagctcggccttgaccttctgcgcgtattcgtcgacgtattcctgtccgctcatcttctggatctcacgggtcacgcggtcggtaagcgaacgcaaatcatcgtgggtaatctggtcggcggatttcttctcgacttcaatcggcttgccgtaaatcaccttggacttgcctttgttcggaatgacctgtcctggcttctgcagttcacgcgaaccgatgatggcggccggaataatggggcaaccggtttcgaatgccagacgcgccgcgccggtgtgtcctttgtaaagacgtccatcggggctgcgagtaccttcgatgtgaatgccgaacagatgtccgtcctcgatgatctcacgggcgtggttcagtgcgccaagtgatttggaaccgccggaacggtccacggggaacacgccgactgacgtgaaccaccatttcttgaatttgcctttgatgcctttgccttcgaaatattcggccttgcccatgaaatgaatcatgcgcgggcaggtcaacggcagcaacgcatcgtcgatgacggcaagatggttggctgcgataatggcgccaccttcgtgcggaatgttctcaagtccttgcgcggtcggtcccaaacggtggatggcgataggtcccaagcctttaacgaaaaaccaatagagcattcttcacaatcctcccggcggattggcgtccgcccgattagagtataagtatgactgacctcaacaatagcaatgacgatgaagaacgcccaaatgacgcgtcgcatggtggcggctctccaatggacgacttggatgcggcttgggccgagtttgcggattcgcatgctgacgatttgaaggccgtggaacgttcgcgtagtgcgaaacgtttcgagaagcatgcgcaacgtcgggaaaaagaggctttgctgtccatcgatgacttggatcagggcacgttcaccaatgatgcgccggcgaatggtcgtgggccgcgcgatttcactggttcgagctggcttgacacggatcgggtcatggaccgttacggtgacgacttcgtgccgccgaatcctgaaatcggccatgtgaaactgtcaaaactggtgttctggatattgctggtggccggcgtcatcggcattatcgcttccgtgttcgttccggcgttggcttcgattcttggttcgattttcggtttgtgtgcgctggtcggcgccgctggcctcatcgtgcagcataaagggcatcgtgaaacgcgtaccgacgaattcgatgatggagcacgcgtctgacgattctttggcgacaaactgaatacatccatctatgtgaaggccccggcggttattgaactgcgccccgtttgttggacgttgttaattgggatacagggtcagaccgcgagggacatgctccggaactcctccggggtgcgtccctcgagtcgtatctggcgtcgtctggtgttccaatggatgatgtaggcgtccagctcgcgtttgaactgttcgtacgagtcgaacacacggccgcggtagaactcgtccttcaagtggccgaagacctgctcggccgccgcgttgtccaggcagttgcccttgcggctcatggactggcggatgccgaggcgttcgagctcgtcccgccaccattggtgctggtactgccatcccatatctcccgtaccatcggctccacgtccggcctggacacgtgcgccgggcgcgacaggtggtggtagtacgtggatttcggcaacccggctatcctcaggaggtggccgagccggtgtccccgccctgcgagcagtcggacgacggcgcttcgctcgcgccgcgtgacttggacgcccgcagggcccggagtttttccaggtacgcgaccttcgccttcaggtacgcgacctgttcggcgagctcctgctcgcgcgtcggttcgggcttcggtttggatttcgcgcctttcggcctgcccttgggtttcggcctgagcgcctccggacctccggaccggtagtcgcggcaccagcgctccagggacgcgatgctcgcgatcccgtgcctggccatggcctccgtcttggtcagaccgttctcgacgtggtcgcgcgccgcggcgaccttcgtctcccagtcgtagcgtctgctgccgccgcctcccatgaccgcctcctcgccgttgaacctgtacagcctgatccagtttctcgcggtatacaccggtatggcaagccttctgacgagcgcgtccttgccggctccggacttgatgagctccagcgcctcgcgccggaacccgtcgtcgtaacgtctccttcgatcctcacgcatacgaaagaaccgcacctccgatcatcgaatctgaatttcttcagtccaacaatcggagtgcggttcatatttacgccggggccttcacatacacatacgttgtcagcgttttcaggctttcttcgcagcttgggcggtggcgatccacttgtcaagcagcgccgtggccttgccggagtcgacggtctgctccgcgatggcgtaggcggctttgaaccggtcagccaagcttgcgtcgcccggcaccaaatgaccgtcggcgacgattgcggaagcggcgttcagcagcgcggtggtacggaacgacacatccttgcctgcgaagaagtctcgtgccagctgcgcgttgagcgtcggttcgccacccttcagatctgcgatggtgactttggcgaggccgagttcgacggtcggatcgaatttgttttcggtaaccttgccgtccttgaattcccaaatggagaccggaccggtcggtgccatctcgtcaaggccctcatgggaagtgtagaccatgccgatctggccgttcgccgcatatacggcggccatgatcgggctcatcttgcgattagcgcagccgacggccatatgcttcgggtttgccgggttggtcagcggaccaagcacgttgaacacgcatggcacgccgagcgcggcgcgaatcggaccgacaaaacgcatggcggggtggaaggtgcgtgcgaaagcgaatgcgatgccgcattcgttgccgacttcgctcacttgttccggagtcaaatccatgggcaggccgagcgcttcgaagcagtcagcagtgccgcacttggatgaggccgcacgattgccgtgcttgacgacttttacgcctgcggccgcggctacgacggcccccatggatgacaggttcacggtggaggctccgtcgccaccggtgccgacgatgtcggtggtttcgccgtcgatgtgcagcggaatggcatgggccaccatggccttcgccgcgccacgcacttcgtcgggggtcagccccaactgctgctgggtggcgagtaccgcgccaacggccgccggatcggcattgccgttcatgaggtcatcgacgaaccactcggattcctcggcgctcaagtggtcccctccgaccagcttggtgaggatcgacttccatgtgatttcggccatgatgccctccttggcgctgtcgcacgcctttattgttgttctgatgccgccaattgtaacgattggacgtttccccacgtccgcacgtccatatcacgaaacggcccatcgaagattcttcaaaaaagaaaacctcccccgattacggtcgggggaggttatgtcatgagcaagtcagcgactcagcgaatcactgctcgttctggccatggcacatcttgtacttacgaccggaaccgcacgggcactgggcgttcttgccggttcccgggaaggtgcggccatccgcccacggggagtgcagctcctcgctcttcggacgcttgttggccggaaccttgccttcggcgtggctgatcggctgcatgccgacgatgcccttctcgttcttctgctcgtcagccagttcatcgatggtggtcttttcggcctcgtcatcggtctccggctctgcaggagcggattcgccggtcgcggcggcttcgccgtccagacccattacggcctcggcggcgttcacggcctcatcctcatcggattcggtctcctcgtcctcggtcatggccacgcgttcgatgtccacgtggaacagcagctggatggtttcctccttgatggcttcgatcatggagttgtacatctggtagccttcacgctggtattcgaccagcgggtcgcgctggcccataccgcgcaggccgatgccgtccttgaggtagtccatctcgtacaggtgttcacgccacttgcggtcgagtacggcgagcaccacgcggcgctcgagctggcgcaagccttcgctgccgagcttgtcttcgaaatcggagtactggtccttggcgtcggagacgatgagctccttcagggcctcaacggccttgtcgcccttgagcttgtcgacggcgtccttggccgcttcctgctccacggcgatcgggtacacggaggagatggccttgaacagaccgtcccaatcccaatcggccggcttgtcggaaccgttgttggcgcccttgatgtagctcagcacggtgtcgtcgatgaacttgaggatgtcctcgtggatatccgcgcccttcagcacagcctgacgctccgcataaatgacggtgcgctgcttgttcatcacgtcatcgtacttcagcacgttcttacggatttcgaagttacgcgattcgacggccttctgcgcggtgcgcacgcccttggaaacgctcttggcttcgatcggctcgccttccggcatacccttggccatgacacgcgccaccagctgggtgttgaacagacgcatcagatcatcttcgagggacaggtagaaacgggattcacccggatcgccctgacggccggaacggccgcgcagctggttgtcgatacggcgggattcgtgacgttcggtgccgagcacatacagaccgccgagcttgacgacctcctcatgctcgtccttgacctggtccttgatctcggccaaagtgcccggccaacgcttctcgtactcgtccggagtgtcatccggggagtagccttcggacttgagcttcgcatcggcgaggaactcgacgttgccgccgagcatgatatcggtaccacggcctgccatgttggtggccacggtgacggcgcccttacggcctgcgacggccacaacggcggcttccttgtcatgctgcttcgcgttcagcacctggtgaggaatcttggccacgtcaagcagagaggacacgacttcggaggattccacggatgcggtacccagcaggaccggctggcccttcttgtggcgcttggccacatcacggacgatggcggcgagcttttccttcttggtacggaagatcagatcgtccttatcctcgcggatcatcggcttgttggtcggaatcggcagcacgcccagcttgtaggtgcccatgaattcggcggcttcggtctctgcggtaccggtcatgcctgccagcttgtcgtacatgcggaagtagttctgcagggtgatggtggcgaaggtctggttttcggccttgacctccacgccttccttggcttcgatggcttggtgcagaccctcgttgtaacggcggcccggcaggatacgtccggtgtgctcgtcgacgatgagcacttcgccgccggtcacgacgtagtcgcggtcacgcaggaacagctccttggccttgatggcgttgttcagatagccgatcaatgcggtgttgttcggttcgtacaggttgtcgatgccgagatagtcctcgaccttggtgatgcccggatcaaggatgccgacgaccttcttcttctcgtcgacctcatagtcctcgtcacggttgagcttcagaaccaggcgcgcgaactggcggtaccagcgggtcacgtcgccctcggccggaccggagatgatcaacggggtacgagcctcatcgataagaatggaatcgacctcatcgacgatggcgtagtggtggccacgctgtacgagatcggacttctcccacgccatgttgtcgcgcaggtaatcgaagccgaattcgttgttggtgccgtaggtgatgtcggcgttgtactgcttgcgacgctccggcggcttctggttggtgatgatgcagccggtgctcatgccgaggaagcggtagacacggcccatcagctcggcctggtagctggccagatagtcgttgacggtgacgacgtggacgccctgaccgtcgagtgcgttcaggtaggccggcagcgtggccacaagggtcttgccttcaccggtcttcatttcggcgatgttgccccagtgcagagcggcgccgcccatgagctgcacgtcgaagtggcgcaggcccaaggttcgcttggaagcttcacgcacggtggcgaaggcttccggcatgagcttgtcaagggactcgccgttttcgatacgctgcttgaacttggcggtctggcccttgagctcctcgtcgtcaagcgccgcgatctcgtcctccaaggcgttcgtcgctttggccacgttctcaagcttcttgatctgtcggccttcacccatgcgtagggctttgtcaacgatatctaccacaatcactccctttgtgtatggtgactttcctcgattgaggatagtcgctttctcgcgatttccgaaaagctccgtccattttacgtaagttttgacgtatcttgtttttcgcataagaaaagaggcccgcatgtatgacatgcgagcctcttatcgttcagttttcagccattagccattacttcttggccacattctccggagtgtcgatttcgaagacgccgtagctccaaccgtgacggtggtagacgacggacggacgaccggtttccttgttgacgaacaggaagaagtcgtgaccgatcagctccatctcgtacagggcctcgtcaatggtcatcggctcggcgatgtgcagcttgcggcggatgacgattggggtgtcgccgacctggacctcgacggattcgccagggccgagatcagcggaaacggcgtcggccgggctattgttcggcgcttccggctccggctcctcgacgacgaccggctcgaccgggcccagatcgaccgggaccggatcggtgtagccacgacgatggtccttgcggcggtcgcgggtacggcgcagacgaagcgtcagcttgtcgagagccaaatcgagcgcgctgaactcgtcggcgctggaggcttcggcacgcaccacggtacgacctgcgatgacggtgatctcaacgcgcttggcggtgtcggcctgacgcggattgccctcgtgggacagcacaatctggacacgctgcgcatccggggcgatagcggtcacacgattcatcttgctttcgacaacgtcacggaacctttgcttgatctgcgtatgacgtccggtaacgacgatttccatgtggacctccctagactcaagcggtgttaaccgctatatacggaccaaccagctgcatcgctgcttggtagtcatcattgtatccataagattggtgatttgctggaaaactccccgagaaaacaaaagtttttttacgctttgctttcgacgattctcttgctatagttgtgcgtttgagacctcttgatggccgcgaccgattttgtcggttgaggaacttccgggctccatagagcacgatggcggataacgtccgcccagggcgacctgagagatagcgcagcagagaatagaccgccttaccggtttcggccggtgggtaagggtgaaacggcggtgtaagagaccaccgggccgctggtgacagttggccgcatggcaagcctcatcgggagcaaggccaagcagaaggcgttcgaggactgctcgtccgaagccttcgggtaggctgctagagcctgacggcaacgccaggtcgagatggatggccatccgtgccgttggcacgacagaacccggggtataagaggtctcactctccactctttatgttttgaggatttctttacaccagcctctttatgaaactgacgtcacgcccttggtcaacggtcgccgtcaatcaaacagttcctgtgcgatttggcgcagaatctcaggattatggccttttctgccgcccgcgctccagaagcggcgcctacgtgcatcgcgttccagaccggcggtttttctcgcggttctacggcctaattcccatgcggcttcagtaaacacgccgtaggattccgcctcatcacaaacctgttgggccagcctacggtcgacgcctttccgtgtaagctcagcgaccgcgcccctacatcccataagacgggtcgcacagtagcgtaccgcggattgcgcgtaggcttcatcgtcaatcagttgaacccttgtcagtctttcgatgacgtcgtcaaccacttcagaggtatagcccttaccaatcaggcgctcacgcagtgcgccggaaggtcgaggcgcagcgtccagcaatcgcaatgcggcttccctgcatgcgtcaagatcatttggatcctttgcggcagtagaatcgccgttcccgacacgcccagcgtgtcgcgcgtgtcgtggcgttttcgtcgcatttgcgcttccagcgaacaaactggaacggtcaggtttcgttcgacggttccacctctgaacgttcgtgcgttctggatcctctgaagaaagggcaaggcccccagtatcggccgacgccggctgaaggccctgttccttaaggaaacgttcggcgctgatcatatgtcaggctttggcggcttttgaagttttagacgtcttaccatcatccggcgcgcccgcggcgtcctccgccccatcgtcctcggcgaactggtcggtaggtttgatcagaccgaatgccgccttgaccttgttctcgatttcctctgtgagttccggattgtccttgaggaactgacgcacgttttcgcgtccttgccccagctggtcgccctcataggtgaaccacgagccagactttttgacgacgttggcctgcaacgccatatcaagcacggaaccttctttggagatgccctcgccgtacagcacatcgaattcggcggtcttgaacggcggagccatcttgttcttaacaaccttgaccttggtacggttgccgacagcctcatcaccgttcttaatggtctggatacggcggatgtccatacgtacggacgcgtagaacttcaatgccttgccgccggtggtggtctccggattaccgaagaacacgccaattttctcacgcaactggttgatgaagatggcggtggtaccggcttgcgccagcgcaccggtcatcttacgcaacgcctgactcatcaggcgcgcctgcagaccgacatggctgtctcccatctcgccttcgatttccgctttcggcaccaaggccgcgacggaatcgataacaatcacgtcaagcgcgccggaacgaatcagcatgtcggcgatttccaatgcctgctcgccattgtccggctgagagacgatcaacgaatcggtgtcgacgcccagcttacgggcatagaccggatcgagcgcatgctcggcatcgatgaatgcggccacaccgccggccttctgggcattggccaccacatgcagcgccaatgtggtcttaccagaggattccggtccgtaaatctccacaatacggcctttaggcaggccgccgatgcctaatgccatatccaaagccaaggatccggtcggaatgacctcgacatcctgttccgggcggtcgccaagtctcatggccgatcccttgccgaagcttttctcgacctgcgcgagcgctgtgtcgagcgcggcctgacggcgcggatcgattccattcgcggacttgttctgtgcggcgttctttgccgcgctcgtctgtgccatgactactccttgttgttgaccgagacgaatgaatggattcaccgtaaaaccgcatcatccatctacgcaagttcaatcggccattgtggtcgaagaacatgcatttcgacacgccgaagaccgctttcccttgaaattccagcattctgaaacttcgcggcgagccgttgacgacctgcccaatccgtgcttctgtggataactataccccattatccgaacatctgttcgaaatcggtgttttgcgatagccgaactccgcctaacgcaccggcattggtggcgcgttatggtcctttccccaacgtttggagtcaggaatgttcatctggtcgcacagaacgttccataccacgcggggctcctcccccatttcaagcgcttcgacggctgtcagaccgttcaatcgatcaagcacttggtcgcgtgcgagcgcgcggccatagctacggccgagtacctcttcaagcaactgccaaaattcacgttcctgcacgcgcccaagtgtacacagcaagcgcaaccaaaagaaaacgcccgacggaacaagccgccgggcgttagacgtccaacaggaatcagattgcgacggaatcgagataatcggcgaccatgcgcagcatctgcgccgtggagacgcccaacgattgcgcaatcgagctcagcagctcggagctggcctctttttggccacgctccacttcggagaggtagcccaacgacactccggccttttcgctcacctcacgcaacgttttgtggtcatgggtgcgcagatcgcgcagtacatggccgatggcctcgcgaagcgatacctctctgggttcgtcggtggtttccgtggctgccgacatggatcgtgcggaaacgcgttccgcgtcttcctcccgccatatgcgggtcaatgcggcctggcgctcgtctttggcctttttggccgcgcgggcacgcagcacctgctgctgggcgaacatcaccgcgcggcgctgggctggggtgagttccctgacgcgggcgttaccgctttgcaccgtgggaaccatcgccttgagttccatctgttccttggtgagtgtcatcgtgtccatgccgccagcccctttcgcttttcatacgtacgtccactatggtcaacacccatattcgtggattattcctgtgaaagtgctgaaagagtcctcagtttttccagaatacattgcacggtttcgtgccgcacggcttcccgatcacccttcagacgcagctcataagcagctgtttgacgcgcacgaatgccattgaagccacagggcagggagcagccgatgtacaccaggccggcaggtttgtcaccatccggtcctggccctgcaacaccggtagtggccaagccgatgacacagtctccatcctcggtctgtcggtatagttgcgcggttcccgcagccatctgccgcgccacttcggggtggaccgccccttctcgggccagcaggtcggcattcacgccgagaatcttcgctttggcgcgaatgtcgtaggtcaccgccgagccgaggaacactttcgatgcgcctggtatgcgtacgaaggcgtcggcgagtagacctcccgtcagcgattcggcggcggcgattttgaaatggttggcttcgcaatagcgtaaaacggctgcggccagctcatcgcattgcgattggctggccgcggtcgacgaattttcggattcgctcatcgggatttacttggtttccttttcggattttgcggtcttcttacgtccgccgaacgtgttgacgaggtattcgccgcccgaatacaggcatagaatcaacgccaggtaaatcagagcgtacgtgatcgtgtaataaacggtcatccacagcggagtggtgttcatgccatcagcgaggctccacatcggcagcatgagcatggcaaggccgatgcactggcacagggtcttgtacttgccggcttgggatgcggcgatgaccttgccgccggtgtcgatgacgaagaaacgcatgatggtgatgccgatctcacggatgaggaacagcgcggtcacgacccagccgagcactgcgttgccgaattcgttgaagatggcggcgacgatcagcgtgccgcaggtgagcagcttatctgcgattgggtccatgagcttgcccagttcggtgacctggttatatttgcgggccatccaaccgtcgagcttatcggtgcaggcggcgatgatgaagataatcgccgccacccagcgcatagtcgtgtttttggtaccccatgcgcctgccatgacgtacaacgccaggaagatgacgaccaggacgatacgagagaaagtgacgatgttcggcggggcgttccacccgtcaagcagggacgatttgcgttcttcttgcttttccataccgttcacgttaccccgataccactacttggcgcaatgcgtgcggttgtcgcgttccatcatcgcgtgtccgcagcgtcggccggctgggtagaacctgcggtaagcgatgaggtttcgcccttgatgaaggcgagcacctgcggcagatcctgcggttggacgagcacttcgcgagctttggagccttcggacggaccgaccacaccacgcgattcaagcagatccatgagtcggccggctttggcgaatccgacacgcagtttgcgctgcagcatggaggttgagccgaactgcgtgctgaccaccagttccgccgcctgcaacagcacgtccatgtcgttgccgatgtcctcatccggctcgatggccttcttttcggcctccttggccatctcctcgatatcctcgcgataatgcggcttgcgctgggttcgcacgaactccaccgcgcgacggatttcggactcgtcgacccatgcgccctgcacgcggatcggcttggcctggcccatcggcaggaacaacgcgtcaccttggccgatcagcgtttccgcaccggtggcgtcgaggatgactcgcgaatcggtggcggatgaggtggcaaaagcaagtcgggacgggatgttggccttgatcaagcccgtgaccacgtcaacggacgggcgctgcgtggcgagcaccagatgcacgccggcggctcgcgcgagctgcgtgatgcgctggatggagctctccacgtcgttcttggccaccatcataaggtcggccatttcatcgacgaccacgaggatatacgggtatggtgcgaccttgcgtttggagcctgcgggcgcatgcaccttgccagcgcgcacggcagcgttgaagtccttgatgtggcggaatccgaagaattcgaggtcgctgtatcgtgcgtccatctccttgaccacccattccaaagcctgtgcggccttcttcggatcggtgataatcggggtgagcaaatgtggaatgcccgcataggcggacagttcgactcgtttaggatcgaccatgatcatgcggacctggtcaggcgtggcgcgcatgatcacggaggtgagcatggagttgatgaagctcgacttgccggagccagtggcgccagccaccaacaggtggggcatcttggtcaggtcggcggtcacgaaatggccttccacatccttgccgacgccggtgagcatcggattcggatcgttccgggccttgtcggagcgcagcacgtcgcccagcaccacggtttcgcggtcggagttcggaatttcgatgccgatggcggatttgccttcgatcaccgacaggatgcgcacgtcggagctggccaccgcgtaggcgatgttcttctgcaggttggtgaccttctcgaccttgacgccagggccaagctccacctcatacatggtgacggatggtccgcgcaggaagccgatgaccttcgcatcgacgttgaactgttggaaggtaccggtcagcgcgcggatcacacgatcgttctccggagtgtgcgcggcgtgcggcgcgcccttcttcagaatgttgaggtcaggcagatgatacggtccctcgggaatgtcatccgccgcttccccgtcaacggcagcagccggcatatcgtcaaggacctcgccggtcgcggcatccaccatgacttccttgccgttggaggtgccgtcctcgtcgatgacggcccatgggtcgctcggagcgacgccaaccggcttgatttcgctggacggcaccggctcggcgacgctgggcatggtgccgctcgcggtgccgatcggcgcggacgagaaggagcgtccgcgaccgttctgtggcatggccgtggtgccggacggtgcagcggcggaataatcatctgaatcataatcatcggcacgataatcgtccgaagaaatgctgcgtggcgaatcgacctgttggtacggctcgtcgacgatggtttccgcggtctgtccgtgccgttcggcggcattaagaaacgcttcgtcgccggcgtaatggtcaaggtcgccatcatcgacgttcttgctcttatgggatgcgaagcgttgcttcatacgcgtaaggaagcccggcctatcgtcgttttctccatccgcatcggtgccgtcgtgggcgggaacgccttcggcgaaggcgagtgtcgtgtccccaacgcgtacttcgttcgggaactgttcggcctcatcgtcaatgtcatcacggtttttcggcgttccaacaaacttggccgccagagccttcgccttgtccggtatctgcgtgacccgggtatgggtgatcaacagcaacgaaaacaggatgacgactacgaaaatcgcaatggaaaagcctttggaaagcccccacgccaacggacagccaagcacatagccaagcaggccgcctgcccgctgcagcaaagacatatcgaacttctgggagtcggaggcaatcgccgcgtcaagaatagagcagacggaccagaggatcatgaaccatccgagggccatatggaggttctcatccttgttttgcgtcttgcgcatcagactgaacaccacaagcgccaggaataccggcagaatcacgctggtcaatccgaacagtccggaggccatggcatgcaggacctgtccgaaagcgccctggacacggaaccattcggatgcgcagaacagcaccgcgagaatggccatgatgaaacatgcgatgtcgcggcgatatttacgcagtatgccggcgatcggcgaggaatcgacctcgtccatgactttggtatcgccggaacgcgatttgcctgcggaacccttgccgcctgatttcgggttggaagatgctgttcgtgccataacaggactcgattttacccatgggcaccgccatggcacgacgacatccgatacttatcgaaagtttttgccgttcacgccgtcaggcgcttcggctaggcgatatcgccaagatgatgctgcgtgtacgcatccgcctgcgcgtcgatcgcgtcgtaatagccggcgtcggcatgctcgatgatggccatggcattgcccagcagcgcggggttgagagcctgcagccagtggatacgcggatcgcggccaaaccatcccatctgtttgcgtgccagacgcttcgtcttctgcgcgatgctcatgaacgtgtcatttaaatcgcacaggccatccaaatagtcgacaacctgctggtatccaagagccttgcctgcggtgatgccaagccggggacggatacgctccacttcctcgacgaaaccgttctccagcatctgcttggtacggatgtcgatgcggcggtcaagttcctcacgcggcaaatcaaggccgatctgcacggtgggaatcacataccggtaatgcggcaggctcgccgaatacggccggcccgtcacttcgatgacctcaagcgcgcggatggtgcgtcgaggattgtgcggatccatgcgggccgcggcttcgggatcctttgtcttgagctcgccgaacagcgcaccggcgccttcgaccttttcacgttcctcaaggcgtttgcgcacctctgggtcagtgccaggaaaggaaatgtcgtcgatggcggcacgggcgtacagaccggaaccgcccacgaggatagggcgcactcccctggcctgcagttcggcgattttggcgcgggcgatctcctggaaacgtgccacggacatggcgtcgtccggttcgatgatgtcaatcaggtggtgcctgacctcggcctgttcctcaggactcgccttggcggtgccgatatccatgcccttgtacatctggtaggcatcggcgttgacgatttccgcctgctcgcccttggcctccaacgccttggcaatggcgatgccaagtcccgtcttgccggacgcagtgggaccgacgatggacacgaccttacgggtttcgggcttgctttcagtggcggacggcataggtttgccccgcttccggattcggatcggcgatgagattgtggcgtcccgcatgggtgacggtggcggtcacgaaatcacccacctgcggcatcgactcgccttccggcacgccgacatgcaccagcacgcccgtcttctcacgtccagtaacacgatgggtggcggcatccttcttgccggatgcgccggtgaccatcacctcgacgtcacggccttcgaaagtcttgagattctcttcggtgatacgttcctgcagcgccacaagacgttcgaacctgtcctgcaccacgtcatgcggaacctgctccatctcagccgccggcgtgccgggacgcggcgagtagatgaacgtgaacgcggaagcgaatcgcgcctcctccaccacgcgcagggtttcctggaagtcctcctccgtttcgccggggaagccgacgatgatgtcggtggagatctgcgcgtccggcatggcctcgcgaatcttgcgcagaatgtcgaggaacttggcggaacggtaggagcggcgcatcgcacgaagaatcctgtcggaacccgactgcaacgggaaatgcagctggtgcatgacgttcggcgtctcggccattgctgcgatcacgtcgtcggtgaaggccgcaggatgcggcgaggtgaatcgtacgcgttccaaaccgtcaatctcgccgcacgcgcgcagcagcttggagaaggcaaaccggtcgccgatgccgtagccgaaggagttcacattctggcccagcaacgtgacttccttggcgccttcgtccacgcattggcggatttcggcgaggatgtctccgggacggcggtcatgttccttgccgcgcgtggtcggcacgatgcagaaggtgcaggtgttgttgcagcctacggagatggccacccagctcgacaccttcgacgcacggtcggttggcagctggcttgggaagtagttgagttcctcctgcaccttcacctgcgcatggccttcgatgcgggcctggtcgagcagctgaggcaggaatccgatgttcttggtaccgaacacggcgtcgacccacggggcttttttcgcgatcttctcacggtcgagctgcgccatgcagccgccgaccgcgatctgcaggttcgggcgttccctcttcaattcggcccacagtccgatggtgccgtacatgcgttcggcggcgttttcgcgcaccgcgcaggtgttcatgacgatcaggtcgatgtcatggttgagatactgttcctcggtggcgggcacgtagccgtcggcctcaagcacgccggcgatgcgttcggaatcatgcacattcatctggcatccgagcgtatgcacgtagaacacgcccttgccacgcgtgggggtatcgttcgccgccggttcggccagtttcgaggcgcgctccgcctcggtcatcatgtcttcattcataacgcaccatgctatcggcagggcggcacaggcgtttcggaacgcgggaacgccccgttctcggcgcaatcgcagggcattgaccctcttcgatacacagcatacgttcagttttgcggaaagcgaggcggtacactgttcttccgtgatacttgacaggcaaaatcgaattaacaccaccgaattgcagatgcgtctgaagaacgtcgacgtcggcgagggatccctttcccccgaacagatcaccgagttcatcgaccagatgcaggtgtatgagggtgcgatgtacgagatcagcaccaaattggagattcttgactcggaattccaggtgcgcttctcccataatccaattcaccatatggaacgccgtctcaaatcgcttaactcgatcctcggcaagctgcagcgccgcaacctgccgttgaccgtcgacgccatcaaggacaacctgttcgacgtggcgggcgtacgcgtgatctgcaactaccgcgacgacgtgtattccgtggcgaattatctgtccgcgcaaagcgacatccaagtgctgcgtgtcaaggattacatcaagaacccgaagcagaacggttaccgttcgctgcatgtcatctacgcggtgccggtgttcctgtcatccggaccgcactacacgccggtagaggttcagctacgcaccatcgccatggattattgggcgagcctggagcatgcgctgcggtataagacggatctgccggacgcgaagcttgccgagcattcgcagacgctgttggattgcgcgcgcagcctgcagaacatcgagacgcagatgcagaacatccatcgcgacatcaacagcgccccgcgtgtaggtgaggcgccgcaggcggactgatgttttcggaaaatggcgattgacggacaaatcattgcctgtcaatcgccatttttcgacgatatcgaacgttattcgcgcttacgcagcaatcgtggtattttcaccggaacctgtgcgagcacggtgccgatgaagatcagcgcgcagccgatgtaggctcgtgtggtcatgacttcgccgagcagcaacgcgccgcccaccgcggagaagaacgattcgagcgacatgatcacggccgcgcgcgacggcggcaccagctgctgtccgaccacctgcaacgtgtatgccacgccggccgagccgatgccggcgtacacgatgggaaaccagctttgcatggcgccggcccagtcgatggagccttcgcatagggagccgatccagctcagcagcgcggtggtggaaatttgtccgaaggacagcagaatcggatccatcttctgtccgaacgtgtcgatgacgagaatatggcctgcgaatagaaccgcagtggacaacagcaccacgtcggcaagggtgatcgagccgaatccgtcggtgatgcacagcagatagaagccgaccacggcgatggcaacgctgacgatgacgttcatggtcacgcggcggcgcagaataaggaaggcgagcagtggcgtcatgacgatgtagagcgccgtgatgaagccggaacggcctgcggaaccggaatagaggatgccgtattgttggacggtgctggcggtgaacaatacgatgccgcagatgacgctgacgaccacgggattgcccaggcatttcggcatggccacggttatgccgttgccaagcgtgacggttggacactcattcgattcacggcgtcggcgttcctgttcggcgatgcctcgacggcggaaccacagcaacggtattaatgacagcgcgcccaatgtgaatcgtgtggccccgaagaacagggggctcatggaggccatgccctgcacttgggatacgaatgcgaagccccagatcatggccgtcagaacaaggcaggccatgccgccaatctctttcctctgcatgagccactaccctatggcacgtttttcgccgacagaaaagcctgaccatattctggtcaggctttgtttgagggttcagcgcagaggacgtcgcgggatttttcagtcgcgatcgccgaagagctggagaatatacaggaacatgttgatgaagtccagatacaggttcagcgcgcagatgatggagaccttcttgaccatgtcctcaccctggcctgcgtactgggcgaacagcgcgcgagtagcttgggcgtcgtagacggtcatgccggcgaacagcacgaggccgatggcggagataaccatcagcatggtctgtccgggagcgaagatcataagcagcatttcggcgacgatcagcacgatgaggccgaccagcagaatcggaccggctttgagcatgttgaccttggtggtcatgcccagcatggtgagcgcgaagaagaagccggcgcacaacgccagggagatgccgatggtgccaagatcatacgccatgaaaatggtgcttagcgagaagcccatgatcgcggcatacacgtagaacatgacgcgtgcggtgctcggcttgatcttttcaatgcgggcgccaagatagatggcgatcacgatttcgacgacgaacggcgcccaagcgccaatgacgccaagcgactggatgagcgcgatgtaggcaccggtggcttgggtgaggatggccacagccgcggtgacgagcaggccgatggtcatctcaccgtaggcacgggtgacggaagcatgttcggcacgctcataggagtatgtcgcctgagccggaatggtggccgccggagcgccctgcgtatacatgttctgcggcgcgtactggtattggttctgaccgtacggattctggctgtactgcccgtacgaattctggttcggattgtattggttctgcccatacggctggccgttgaatccattggcgttgttgccttggggctgctgaccgaatgtcataatcgctccttaactcgattacgcatcacagtacggtacttttctgactatttcatgagagcccacgtcttacggtgccgagctgaaactaccggcaccgtatatccaatgcgcaatcagaccgtgaacttgtgcaccactttcgcgctatcgttcaggtcgaacaaatcagtgacgtcgaccgtcacttcggaatcgtctttcaaggtatatccaatcgtcacggttccggtggctccgggctggacttcggcgaaatcagaattggaatcgtatccggcagggttctcgctgtaaatggcggtgtcgagagcttgcccattttggaacacttgcgggctggcgaggactgcaaacgaattgtttttatccgtgttgttggtccattcgaatgtgaccaacaccgtgggctgattgttatagtcgttgttgctacgtaccgcggagacgattttcacatgcatggtcttcaaatcgccttccatatcctgatcgcccttcggctgattttttgcggagccttttgcggatgattgtgagcttgacacgccggtggcctcgtctatggccttgcttgctgcggactgcatggccagagtaatgacgatggccaacaccgacagcaccgcagcgacaatcgccaatgccttgccgcgctttttaccgcggaacgtgccgaccaatgccacaatcgcaagaatcacaccaatgaaaccgaaaatagcagcaatgttgttgataatcggaatgaagctcagcacgaagccaagcgcgccgaacaccacgccgacaatgccgaacacagtcagtcccttctcttcctgatagaccggctgcagcgggggttggggttggatgggctgctgcggggcgatgtaaccactcatgatcgttccttcttctcgaatcggttgagacactttcgagggtacggaattccgcgctggaccggtattggacgaaaggtcattcccgtctgcactttggggcgtgcgaaacgcacggaagaacaatggcgtctttcggggacgggcccaataatggtaggtatgagcgagacgacgaattccccgacccccatcgaagtgccggtacgtaccaaaggctggcaaagcatggtgatggtggtctgcgcgggcttcatgtgcttggcgcagaccgcgttcgccgcgcaacggttcggccaggattccgccgtatacgtatggatggtgttctgcatgctggtggcgttcgccatcgggtttctgctgctcgcccgttcccgttatccgcgtgccacattcgtcgccgcgtgtgtggtcgtactggttttcccatacgatcccattctcgctttgatggcgttgaccgcgctattggcccgccgtaatgacatgaagaccacggttcgcgcgatcgtggcgggcggtttcgtcacgcttgccgcgcaggtacgcgacgcgttgcggccgccggaggcatccatctggcatatggtgttcgccaaaccggataccggcagccaatatggcaccgacataatcatgcttgccgatgaccgcaccatcgtcatcaccgcgatagttgcggcattgttggagctggccatcgcgactttggcggggttgcatatccgttctcgcgccttggcatcgctggccacggccaaggcggacgcggcggacgcgcaggtggagcagctcaagaccacgatcgacagtcagcagctggccgacgcgatcgctgccgaagcgcatgacacgcttgcccattcgctttccctgctggcgttgaatgcgagcgcgctgcaagccgagtcgaagaagctcgcggccgaagcgggaagtctggacgccggccaactggccgggcaggccagccgaatcgcggacaaaaccgaggagattcgcaaacaggcggcaggagcgttggacgaggcgcacagtgtcatcgacatgctgcgtcatccggaacaggcgaaggcgcaactggcgccgtccgatgagacgtcgttgacccgtgaatcgttggatgcgcttctcggagacgcacgtgccgccggcatgcggctcaacacatggattgacatccaacaattgggccaactcaacagggaaaccggcaaaatcgcctatcgagtccttcaggaggggctgaccaatgcgagccgtcacgcgccgggagccccggtatcggtggaactcaccgtgaaccccaccgtaggcgtgcacgcgcatgtgtccgatccaactaatccgtccgttccggcagcatcggcggatgccacgcgtcccgccatggattccaaaaacgctttccgtaccggtgccggattgccgggattggccgagcgcgtccggcaggccggaggaacatgtcgattcggttttgacgcacgacacgcgttccatgttgatgtgcagctaccatgggttgagtgagcagcgaagagaacagcgatgacaggccgataacggttggcgtgattgatgacgatccgatgatttgccaggccatgcggctgattctcgaagattattccaccggcaggctcaatgtcgttttcacctgcaccgatggcggtcaagcggtcgacgaggccggcaggcatcatccggatgtggtgttgatggatgtagccatgcccggcatggacggcatcgaggcgacacgaagactgcgcgcacttccgcagccgccgcatgtgctgatactgacgtccttgagtccgagcgggaccgtggagagggccgtcgaggcaggcgccgagggttttgtctccaaaaccgatgcaccggaggacatcatccgccgcatcaccgatgtgtgcgacggtctgccgcaattcaatccatccagccaacggcagctcatcaacgatctgaacatgcagcaaccgcaatcgcgccgggacgaggctcgcgccatgctcgacgctctgcctgagcgggaacgcgaggcggtggttcttgcagccgacgggtacaccaatgccgaaatcgcggaacgaatgttcatttcggaacgtaccgtcaaggcgcacatctcatccgcgggagacagattatgcatgggccgggtacagatggcgcgtttggttgaacgtgcggatctgccggaccaattatgaggcgaaggattctacggcagtggagactccgttacgtccatgaaacgccggtgcaccccctcccataaactagaaaacagtatgccgcacctgcggtgcaaacgttatcaatgagggatggcggtcgatatggcgatcagcgcgacggaaaaacccctgggcaaagtgttcacttccgattaccaactcaccatcccttcgttccaacgcgcgtacacgtggcaggcggagaacatcgaacagctcgtcaacgaccttcaggacgcctgcaccgacccggacacgccttacttcctcggctcgctcatcctcgtcaaggacggccccacccaataccaggtcatcgacggccaacagcgcctcatctccctgtcaatcatcgtctccgtgctgcgcgaactggaagacgaccccgacctcatcgacagcctcaacgacctcattttggaaccaggcgacaaactccgcggcatcaaagccgagccacgactcaccctgcgagaacgcgacaccgacttcttccgcatgtacgtgcaggaaggcgatttggaaggcctgttcgatctgagggacaacgacatcgcctcgcacgcgcaacgcaacatcgccgtcaacacccgccgcacattcgacctgctcgccgccatggacgccaaagaccgccgccgattcgcctcatacctggtcaacggcgtcaccctcgtcatcgtcaccaccgacgacctcgccggcgcgcaccgcatcttcgacgtgatgaacatgcgcggcgtgccactgaccgcatccgacgtgttcaaagcgaaaaccatcgcggaaatatcccccgccgcacgtaacgcctacgccacacgatgggacgacatcatggacccgctcggcgatgactcgcacacgctcgaagagttcttctccgacctgcacctgatcgtctcgcacaaggccgtctgcacacagctgcttgaggaattccgcaaagacgtgctcaaaccatacgtgaagaaacagaacgtcatctccttcatcgacgatctgctcgccccttatgccaacgcgtggctcatcctcaaccgtccgaccgacgccaacctgccagacgacatcgtggccatgctcgtctcactcgccgactaccagaccgccgactggaaacccgtggccatgtgggcgctcgtcaactccatccgcaacctcggcagcgccaacgcacaagtgttctccacacccggaaatatcggaaacgaaaccacgaacgcgcacgacgaacgcctccaattacacgacatcgacagactccacgacgttctcgccgcactcgaacgcgtcaccggcgtcgacagcctcaaccggcaaagcccactcgcccgacgcacacgcgccgcaagcgccatccgagacctcaacaaaggccacaccctccaacagatccgcggattcctcatcaccgacgaggaccgacgttccgcactcgcgcatctacgtggcgagttgcagaccagtcccgccatgaagaaacttctgctcatccgcgccaacgagcagaaggccggctaccgcatcacccgaccgcgcagtctcaaagcgttgccgatcatgcccgaacaggtcagcgcgaaatccgatttcgccgcttggccggagtcggtgcgtgaccattgggcaaaccgcatcggcaatttggtgcttagtcaggccaacgaaacccaagtcgcgccactcgccacgtatgcgcagcggcgcgaccgcatgctgttgtcggcaagctccagacgttttccgctgacagccgagctcgccaatatcgccgaatgcacgccgcagacgctgcaataccggcaggatgagatggttcggctcatcgccgaccattggaatattcgttacgatgccgacgatacggatttgtcgacgttgaacgaggagacgctcaatgcgaaagctacggcctcctctcccacgtccaaacgcgtcagcattgcccaagtgctggaagccgggctgcttatcgccggagagaccttggtatgggagcgtccccgcaagggcgaacgttgggtagcgaccgtcacttccgaaggcaagctgcgcatggatgacggcagggagtatgccacgcctactgccgcggcgcgtgccgttggcggctcatcagcgggtcttaccgtgtggaaacgcacgtcgaatggccagaaactgagtgacgtttggaaggcgtatcgtctgcgcaagcactgaggacgccgaacgaccagatggtcagtctcaaccagccggattcaatcaaccggattcagccggtcaatgccaagccagccattcgacggcgagtttggtgcgattggagatgttggttttggcaagtatgtcgctgatgcggttgcggaccgtgccttcgctgagaaacagccgtgacgcgatctcacgattgtccaatccctcggccacaagttccagcacgtccaattcgcgttcggtaaggccggcgaaacgttcggatggtccgctggaatcggggttccgaaatccttgaactgccggcgcatcatcatgcgacacaacgcgatcgactgatgaggattcgtctgatgtcgtggattgcggactgacccgcagcttgctcaacacttcggcgcccatgaccacttgtccggccatgacggcttgcaccgcgggtatgacggacgaaacgtcctgtttgatcaagtagcctttcgtgcctatttccaacgctttggcgatgtatgactcgtcggcgaatgtggtgaggataaggattcgcgcgttcggatgcgcgtcaagaatcgcctccgacgcttgcaatccatccattcccggcatctgcacgtcgaccagcaacacatcgggggcatccatctcatattgggtcaccgcatccgtgccggtgttggcggtccatgccacatcggcggtgccggtggcttcgagaatcgtggataatgacgagcagacgattggatcatcgtctgcgatcgcgacatgcattaatgcgctcctttctccggttgcgtcatttccgagccactcgccggcttggggatggatacgaacacgcgccaaccctcgtgatacggcccgcaaatcgcggagcctcccaacgcacgagcccgttcctcaatgtccgaaatgccgatgcctgtggaatcgtccggtcgaatgaactgcatggcgacggcttcagcagacgatcttctcacggttccatcatcctgcacgcacagctgccacaatgcggggaaatcgcgcagggtgattgaaacgttccttgcctgactgtgtttgaccgtattgttcaacgcctcgcgaatcgcagtggcgaagcagcgggacacggccgccggcgctgaatcgatgccgttgaccagcctcacccgcaaggggccggcgccgtccatgctgtgcgcggccgtctcaatctgcgaagcgaaatccgtaccttcgtctttcaaatcatgcacggctttgcgcaccaaagtcatagcctcgctcaccgtgtcatgaatttcacagaaacgttgggccgattgttcctgtccggcaacctgggccaccacgtgcgccgcctcggtctgcatgatggctcgggtcagcatgtggccgacattgtcatggatctcacgtgcgatgcgcgtgcgttcggcaagcgtcgccgtgcgtacggccaacgcacgatcctcgtcgttttcggcgatctgcgagcgcaggcggcgaatctggtcgcggcgggaatcctgcaatcgccgcacttcgcgggcgaggttcgcgcagcgcgtgcaaagcagaccggcagcgaatcccagaaccgtttggagcaccatcaatatgatgatggacaagtcggatggaacgtgcgagccaatcgaacggaaaatcactatcgtcatgggaagaagccacagccatcgcggcaccaacgcttgcaagaagcggctgccatcgacaccagcggacgatgatgccgcgttgaatgctgcgatgggaagcatcagataccacgccggcaccaggcatgcgccgcagtcaagcatgacaatcaacgccatcgcaagccacgaacccgacgcgtattcccccaccgcggcacaacacaccgccacaagcgcgccgcacatcaggtcgaggccgacgtctccggatgcgtatacgcccatgatcatgcccgtggccaggaacacggcttggaacagcaaccgtttcatgccgcctcccgtccgccgattcgtgtctgattggttcgcttgcttccagagtaatgcacatggcgcatggcacagccggcggcatcaacgaaggtgacatttgtcatgttcgaaagtgacatcattccggcaattgtgactacgcgcaccatgtcgggggcatccggcggcacgacaatggaatcagaggcatggagcacgagaaaggagctcgtcatgggtggacgcatgaatgacgctgccgatgcggtcagcgcggtcaaggtctcgaaactggtgaaacgttacggagacatgctggcgctcgactatttcgatctcgacgtgcatcagggggaaatcttcggcctgctggggcctaacggctcaggcaagaccacggcgatcaactgcatacttgcgttgctcacgttcgatgagggcactgtgcgcgtgttcggcgagccgatcagccctaccagctatgcgttgaagcggcgtatcggcattgtgccgcagaacgtggccgtgttcaacgaattgaccgttgaggagaacatcgattatttctgctcgctgtatgtttccgacaaggcaaaacgtcgcatgctcgtggacgaggcgttggatttcgtaggattgcgcgattaccgtacctatcgtccggcgaaactgtccggcggtctgctgcgtcgtcttaatatcgcctgcggcatcgcccacaagccggatctgatctttttcgacgagccgaccgtggccgtcgatccacaaagccgcaatgcgattctcgaaggtatccaacgacttaaccgcgaaggcgcgacggtgatctacaccagccattacatggaggaggtcgagcagatctgcgaccgcatcctcatcatggatcatggccggcatctggctcttggcaccgcggaggaacttaaggcgatgatcagcaccggcgaacgcatcagcatcgaaaccgatgatctgggagggcgctcagattcggccgatacgacgcttgcgcgattgcgcgcattgccgttcgtgaccaacgccgactatgacggccatgagctgacggtgaactgccgccagggcgatcacaatctcatcgacgtactgcagctgttggagcacgagggcacgaatatcgggcatctctccagtcgccagccgacgctcaatgatgtgttcctggaactgaccggcaccgcgttacgcgactgacttggcttgcaaggcttgtggcaaatcgaaaggcatgtgacatcatgtggcagacgttactgatcaatctcaaactgcatttgcgggagaaaacgcaactgttctggctgttcgccttccccatcatcctggccaccatgttcaacggcatgttcggcaacatcgcggaaagtttcgaattgcacacacttgacgtggccgtggtcgaggacaacgcgtggaagacgtcctatggggcgcagacgctgatcgaaggcatttcatccgaatcgtctgcattatcggacaatcacgtgaaagtgagtgccgatggcaagaatggaacgggactcatcaacacgaccaaggtggaatcgattgcgcaggcggaacagctgctggccgacggcaccgcgcaaggcatgctgcgaatcgatgacggcagattgcgattctccgtctcacagtcgacgcaatcgtccgcgtccgatgtgatggcgtcgagcagcggcttggatatttcgctgacggtgctgggcaacatcgtggacctgtacaaccgcaacaccgatgtggtggtggacattgcgaagcacaaccccgaagctctgatgaatggcaaggtgaccggcagcatcggttcggcgaatggctatacaaaggaaatccagctgacgaattttaaaccgagcggtacggcacgatattactatgcactgctgggattggccgcgttgatggccatgagcttcgccatcaacgtagtgacgatgacgcaggcgaatctttcggctttgggtgtccgccgttccgtttcgccgcttccgaaatcgcagcaactgctggctggattcctgtccagttggctgtgttcgttcctgagtctgaccgtggccatgctgtatatccggttcgtctgtcatatttcgttgggcggacgtgaatgggctggtgtgggagcatgtctcatggcttcgttcgcggcgagcgcattcggcacgttgcttggcgcgctgccgaagattccaaccggcgccaagcaggggctgtgcacggcgatcgcctgcacgttgtcattgttctccggactgtacggttcgttcgccatgcagttgagcgacttgatcgcccagcgcacaccggtgctgagtctgctcaatccggcgcagcagatcacgaacctgttctacgacatcctctattacgacaatttcaaaccattcttcaccaccgccggcatccttgccgcgatgagcctggtctgccttgctgcggcgaccgttctgttgaggaggcaacgctatgaatacctgtaagacggcgctgagaattctcaaatcgcgcaagatgtacctggtcatctatttggggttcatcggcatcatgatgttcgccatcagctggcagatcatgcgtggctcgatgacgggtggcgatgaggtgttccatcccgatacggcacgtgtggcggtgatcgaccgtgatggcgatgccgatggtatttcatccgcgctgcgttcctatcttgcgttggatggcgagatggtggaccttgccgacgattccgaggcgttgcagcaggccgtcgcttcgaactatgttgatttgatcgcaattgtgccgcacggcttcgcttcggattatcagaaatatctggatggttcgtcaaatgaccaaccgactgtcgaaaccgttgtcagctacacttccggagcaggctccctttcgcagctggaagtcaacgaattcctgtcattgacacgcaccgcgtacttgggtcaagccgggaagcaacagtcgatggaaacggccatgcggacggcgttggataccgcgaaagcagatgccaagacgtcgaaaatagcggtggtgcaatcgccatccgcagatactgataataccaagccggcggcatccgcattcgccggcaccatcaaaacgggactctatccgttgctgctggtcatgccgatctgcacgttcctggtgattggcaccttcaatgacagtgagattcgtcgccgcctgtattcgtcgccgacgcgtctggtgtcgttgcagatgcaggagatgctcacctgcgccaccttcggcttggtggtgtgcgtgggttacacggcggcgacattggtcttgatggtggccgcaggagtgccgttcgacgggattacatccacgaatgtggctttgacgttcgtgtcgctgctggcgtacacgttgatggcaatcgcctgcggtttccttctggggtcggttggtttctcggaaatggcggtcaatgcgttcgccaacgtattcggtctgctgtgcatgttcacgtcgggtatggcattccccatcgatatgatgcccgaaccgatgatcatgatcggcaagctgctgccgggatggtggctgtgcgtgtccatcgacaacgtgttcgggcttggcacggcggccgcaaccggtgtggattatggttcttgggcatcgtcggtcggcttggtggcattgtttgcagtggcgttcatctgccttggtctggcattggggcgtatccgtcgcacacgcccgtccttggcctcccccaccaccacgcagttggccaagtaaatcaccaagtgttccgttccatcggccgagtcccgatggaacggaacatccgcctttgccgtaggctctcaatcaaatcggatggaaccggacgaaatcggactaggctgaaagcatgatcgaccacattacacttcatgtttcgaacgcggaacgcagcatcgcattctatacgaaagctctgtctccgctcggatacattccaaaagcccatcacgaaccgaccatcggtttcggcgtggatgacggcacgccccgttcggatttctacatctccccgatggacgatccgacgcaacagccgattcccacgcatatcgccttccgtgcaacgaacgaacaagcggtacgcgacttttatgaagccgcgatcacggcaggcggaatggataacggcagacccggaccacgtgcctaccattccgggtattacgcggccttcgtgctcgaccccgacggcaataacatcgaagctgtcacagactggtcgcacacaagccaatcatgaaatcggccgccgaatcgcaaaaagtcatcgggtgacattgcgcagccaacggtacttgcggtagtgcaacaacgcgggaaccattttgatgcattcgtcggtgttgagcagcgcatacaccaccaacacgggcagtttgaacacgaacgcggccaacagcccgaccggcaccacaatcagccacatgacgatggcatcgcacatgagaccgaacttcgcatcgccgccggctggaaaaataccggcgatcgtcagattcgtcatgcatccgcatgccgcgtaatatgcgcagacgaacagcatgaccgacaggtaccgtgtggcttcgggcgtaaggttcgcccattgcaaagccagcggacgcgccgcgacaatcaacagtcccgtcgcggtaccgaccacggccaccagcacgcacatcctgtcgcccatcgccttcgcctgtcggaaatctccacgtcccagcagattgccgaccaaaatgccgccggcattgcccagaccaagggacaggcacaccagcagatccttgacgatattggcgatggaattggcggcgacggcgtccgcacccaaatgtcccatgatcacggtgtacatggtgaaaccacatccccacaccaattcattgccaagcaccggcaggctgtatttccagaaatccttctgcaacggcccatcgggatgcagcacatggccaagtcgcaggtgggggccacgacgggtcgccacgaccgaccatgccagctcaatcgcacgcgaaatcaccgtggatatagccgcgccgaaaatgccaagcgcgggaatgccgaggctgccgataccgtaaatcagcgccgcgttcaacacgacgtgcatgatcacgccaaccgtgctgaccgtcatgcccatcaccgcggaaccggtgttcttcatcagacacaggtacatctgggacaggccgatgaacaagtacgacaatgacgaaatccgcagatatcgcgcgccaagcatgatcagcgtgccgtcattggtcatgatggacatcaactgttccggcacgagcagtgccgccaggaagaacgccgtcgacagcattccggcatacagcatgacgaatcccagcacgcattccaccgcgtcacggttgccggcaccccaatactgcgccacgagaatgctcatgcccagggtcagggccgcagtgaacaggctgaacaggaactggaactgcgtggcgagcgagacggcggccaactcgttttgccctacccccgacaacatcagcgtgtcggcgcaggacgacaacgacagcatgagctgttggaaagcgataggcaaagccaatttgaatacatggccgaggaattcccggtccggcatgatggtgcgcacgatagtctccattggaatacaagcccgtttcagacgacgggcaaacgaaaacgtcgggatatgtaggccgaccagccttatcccgacgttgggccgaatattgggcgaggttttacagcgaatccttccatgcgcggtattcggcggccttgccctcccagtattcacggtccgcatcagtgatcttgcgaatcacatggcacgggttgcccacggccaccgaatgggatgggatatccttggtcaccacggagcctgcaccgatcaccacatcatcgccgatggtaacgcccggacagaccaccacgctgccgccgaaccacacgtcattgccgatggtgatcggacgggcgccttccggaccggaagcgcgtacggccgcatcgattggatggtatggcgtgtacaggccgacgcgcgggccgaagaagacacggtcgccgatggtgattctcgccacgtcgaggaagatgcagtccatattggcatagaagttgtcgccgatatacgtgttgcagccgtaatcgcagttgaatggcggttcaaggaacgcgcctttgccgagtgaaccgaacagttcgcggaacagcctgtcacgttcctcgaacgcgtcgtatgcggacgtgttgatggcgtgcaccaagcggcgtttacgcatgttcgcttcacgctgcatatcaccgcaaatatacaattcgccggaaagcatgcgttcccactcgttcgtaggcaccgccgcattatccacggcaacggccgcaccttcattctccgccattgaaagctccttgtgaatctgtttgtcaatcgtttgacgtcctttgacaccattcaacaccaccaacatcgacggcagcactcgcaatgttgtagaatcatccttgttctttgcattatctaccgtttattagagtagtcatgaacactgccgatgaagacgcacagatggaacgggacgaatgggcctcccgtgaggtgatgcccatcaccaattggggtcgccgacccgatggttcggagatagtgcagtatgacgcgccgatgttcttctccttcaccgagcattcgctgctccaccagtacccccatatgcgtgcggaatgccattggcatgtcgaccttgaactcacctacatcatccatgggcatatgtggtatttcgtcaacggagaaacagtccggctcgatgaggggcaggcgattttcgtcaactcacgtcagctgcattacggtttcaccaaggacggttccgattgcgaattctcctgcacgttgctcaatccggctaaaatgtgcgcctcattcgaagtgtacgaccgtttcatcgcgccgttgatggcggagaacacgatgccatatgccgtcatcaccgacgacacggcccccggtcggcggctgctcgccaccatccgacagcttcatgcggcgaaattcggtccgctggagcggtcagagcggtcagccgaaccgttgcccgccgacgatatgacgctaaccgacgataccgaggcgttgacggtgctcagctgtttctatgcggtcgtccgcgacatactggcgatcgccggcagtcattgcgcgacttccacagcgccgcacccccgcatcgtgacgctacgcaagatgatcgattacgtgcagagatattacgtgcgtccgatcaccttgaagcaaatcgcatcggccggatcggtgggacgcaccacttgcgcatcgatattccgcgaatcgctcaaccagtcgccaatcgaattcgtcaacgacgtgcgcgtgcgcgccgcagccaacctgctggtaacgagctcgctgcctatcgccacggtcgccaaacagaccggtttctcatccgccagtttcttctcccgcaccttccaccggttcatgggcgtcacccccatcacgtaccgaaccacgcataccaagcggaaatccgaggaataaaaacaatcggctgcatgccccacgccgtcacgcataaggacacgcagccgattgcgtcacatcaagccggaaaggacacgttcacttcctcttcagtccgcgggcgatggaggcgttgcgcacctcgaccgtgccgtcggtggcgaagacgcccaacgactcgcccggacgctcgtacatgcgcacattcaacgccaccccatccacgtgcaacgtgccgatggtgtcgtcgacgacgagacggatgtggtacgtatgccccgcctcgaggccgatgggccgttccaggccgatgttcatgacgtggattggtcctgctcgtcgtcgccgccgcgcgggaccgccacgccgcagtcatggtagtcgacgaagtccttggtggtggcgaggtcccagccgaacggctcgccgaacggttcagggttgcggttgtccctctggtggaacaggaagaactcgtcgcccttgccgaacggcatgcaatcaccgaaccacgtgccggggaactggtagtaaagcttcattggccttgcctttccttgtgtggcgcctttggaaggcagtcacccatgaccgtcatcgcaatgacgctatttcgcttcgtattgcttcgtttaagcgcttaaatgatttaaacgcttaaacgagatatagcattgaaaaacggaatgtcaaacgattgacgtgtctacaacgtccgcactgaatcccgaggcactgccgggcattggacatgaaccggcttgaaccgttcggagactatctccgattcgtcattgtcggctccgcaacgacgcaacagggtacgcacgcccatcacgccgagatcgtactgaggaaggccaacagtggtcaaagcgggatgcatgtgggccgaaatcacttcctggttgtcgaaaccgaccacggaaatatcgtccggcatgcgtttccccgattcccgcaacgcgtcgtacaggccgagcgcggtgcggtcgttatggcagaacactccggtcgcacccgtcgccaacacctgtgctgccgctccgtaaccgccttcctgatcggcggtcacggacagcaccagcgaagggtcgaaatcgacgtcgaaccgcgcaagcgcggccttgtatcccgcaagacggccaaccgaagcgggtgacggcgcggcatcgttgacgaatgcgatacgccggtgtccggcttccaacaacagccgtgtggcggtggcgccaccctgcacttcgtccggcaccaccgcggggaaccgtccgcactcgtcatagcagttgaccagcacggacggcattctgccaagctcgtccggcggagtgattgaaccgtgtacccatttcgagtagatgatgccctcgacctggtgttcgaacatgaacgagaaggttctgcgttccacgtcttttctgccgtcggtatccaccaccagcagaattttcccattacgccaggcttcatcctgcgcgccttggatcacctggccggcgaaaggcgatgtggccactccgtcactgatgaagccgatgatgtcggagcagcctcgggccaatccgcgggcgaacgcgttgtgatggtagccgagttcgtcagcggccctgcgcaccttgcggcgtgtggattccgtgatctgcacgtcccggttgtcgttcaccgcccatgaggcggttgcgatggagacaccagccgcttcggccacgtcccgcaatgtcactttcgccatgcccgcgtatcagccccgtccgacgcctagcgcatcaggttgcgcaggacgtactggagaatacctccgttgcggtagtagtccgcttcgcctggcgtatcgatgcgaacgacggcatcgaattcggtcgtggaaccgtccgcgtgggtggcggtgacgtggaccgtcttcggggtgacgcccttgttgagttcctcgacaccggagatgtcgtaggtttcggtgccgttcaggccgaggctctcatacgattcgccttcggggaactgcaatggcagcacgcccatgccgatgaggttggaacggtggatgcgttcgaagctttcggtgatgacggctttgacgcccagcatgacggtgcccttggcggcccagtcacgggaggagccggtaccgtattccttgcctgcgagcacgacgagcggcacatcatggtcgatatagtcgcgagacgcttcgaagatcgtggtcggcttcttgtcgaggaagtcgtaggtgtagccaccaggggtgatttcctcgccgacggaggcgagcaactggttgcgcaggcggatgttgccaaacgtgccgcggaccatgacctcatggttgcctcgacgggaaccgtaggagttgaagttcttcggttcgacgccacggtcggtcaggtatttgcctgccgggctggaggccttgaacgcgcctgccggggagatgtggtcggtggtcacggagtcgccgagcagcgcgagcacgcgggcgccgtggatgtccttgaccggatccggggtggccttcatgccgtcgaagaaggtctgcttgcgcacgtaggtggagttctcatcccatgcgaacagttcgccttccggcacgtcaaggcccttccaacggcggtcgccttcgaacacggaggcgtaatccttgaggaacatctcgcggctgacggtgccatccaccactgcggcgacttcctcattggaaggccagatgtccttcaggtacacgtcgttgccgtcctggtccttgccgagcggctgggtttcgaaatcgaaatccatggtgccggcgagcgcgtaggcgatgacgagcggcggggacgcgaggtagttcatcttgacgtccgggctgatgcggccttcgaagttacggttgccggacagcacggaggtgacggtcaaatcgttggcgttgatggcctcggagatttccggcagcagcgggccggagttgccgatgcaggtggcgcagccgaagccgaccagctggtagccgagcgcgtcgagatcatcctgcaggccggcggccttcagatagtcggcgacgacctgggagcccggggcgagagacgtcttgacccacggcttgggcttgagtcccttggcatgcgcgttgcgggcgatcaggccggcggcgatcatgacggacgggttggaggtgttggtgcacgacgtgatggacgcgatcgccacgtcgccgttcttgatatcgaagtcgccacggaattcagtggataccgcgatcggatcctgcacggtcttgtcggtttcgtacgccggcagcgtggcttcgaacttctctttcgattcggacagcctgatgcggtcctgcggacgcttcggtcccgcgatggaaggcacgacggtgccgaggtcgagttccagatattcggagtactgcggttcgacgtagtccggatcggtggtgtcgccccacagcttgttggctttcgcgtaggcttcgacgagagcgatctgttcttcggaacgaccggtcagacgcagatagtcgagggtgacgttgtcgattgggaagatgccgcaggtggagccgaattccggtcccatgttgccgatggtggcgcggttggccagcggcacggaagcgatgccttcgccgtagaattccacgaatttgccaaccacaccgtgctggcggagcatgtcggtgatggtgaggaccacgtcggtggcggtgacgccttccggaatggatccggtgagcttgaagccgacgacgcgcggcacgagcatggagatcggctggccgagcatggcggcttcggcttcgatgccgccgacgccccagccgagcacgcccagaccgttgacggtggtggtgtgcgagtcggtgcccacgcaggagtcgaggtaggcgaggtcgcgaccgcgctcccctgccttggtcatgacgactttggcgaggtattcgatgttgacttggtggatgatgccggttcccggcggcaccacgcggaagttgcggaaggcctgctggccccaacgcaggaactggtagcgttcgccgttgcgctggtattcgatgtccatgttctgttcgaccgcgtcggccacgccgtacttgtcgatctgcacggaatggtcgatgaccatgtcggactggacctgcgggttgatgacctccggatctccgccaagctccttgacggcgtcacgcatggtggcgaggtcgacgatgcacggcacgccggtgaagtcctgcatgaccacgcgggacggggtgaactggatctcgtggctcggctgtgcggccggatcccaatccaacagggccttgacatgatcatccgtgatgttggcgccatcgatgttgcgcaccaggttctcaacaagaaccttcaacgaatacgggagatgatcgatgcccggcaaatccgcgatacggtaaaagtcgtaatccttgccgcccaccttcagggtgtcgagctggtcgtcgcgcacagacatgctacctccgagcttttgtggctggttgaaactttccagcagccgattatccgttgccaacgatacagccacgttacttcagcactggcgtgtcttcttgaaacgtgagaaaatggcgaccattttcggcacgcaccacaggcacagcacgaaaacgatggcggacaccacaagcgcgacgcccgtcgccgcgagcatttcgccggacggtatcacgagcgcgaagaaacgcgcgacgggcggaatgaacatgccggccacgcccgccacggcgaacgccaataccagaccgcctctccacgagttgagcggccgggccacgcgcgccagtacgaagatgcccatcatcagcaggataatcgcgttgacgccacgaagcatgcccagctgcgcggcggaatgctgtgcgtcccagcccatgaacttcggcaacagccacgaatcggcgagaatcgacagagccgtggcgatgcctcccggcaacgcgaagtgcaccacgcgcctgaggaagcccggaatgtagcggcgcgtgttcggcgcaagcgcgaggatgaacgccggcatgccgatggtgagtgcgccgatgtaggtgatatggcggggcaggtatgggaatgggatctgcgtcagcaccacgccgaacgagatcagcgcggaatatacggttttgacgaggaacaggctggccacgcgttccatgttggccatgacctggcgtccacgtgccaccacatcgggcagatgcgagaatttcgaatcgacgagcaccacctgcgccacggccttggtggcgggtgccgcgttgcccatcgcgatgcccaggtcggcctccttgatggcgagcgcgtcgttcacgccgtcgccggtcatcgccacgacatgatcgcctaggtgcagcgcctggacgatcgccttcttctggtcgggcaggacacggccgagcacgtccacgttctccagtactttcgccagttccgtgatgtcggtgggcagttcgcgcgcgtccatgaagcgtggctccgcgtctccggtgagccgtacttttcttgcgatcgcaccgacggtgacgggattgtcgccggagatgatgcggcagcgcacgccctgctcgcggaaccaagcgagtgtggcttcggcgtcgtcgcgaatgtgctcggagcataataccagcgcgacgggccgcgatgcggggtcgatggcgggatcgctttcgtaatcggcgggcgccttgccgtcatgccgtgcgatcagcagcacgcggttgccgtcgtgtgcggaatcgttgaccagtcgaagaacgtcggcgtaatcgccatccaagtgggacagcacgacttccggcgcgcccatcgtccataccgcgccgtcatcggcaatcgagctccatttgcgtgccgacgagaacggaacgcgcgccgcaacgggaccggcggagaatccctgcttgcccagtccgttgagaatcgccaatccggtgccgttcggctgtccttcgttcgacaggtcgtacaacgcctgtttcacggcatgttcgtcaacggtattggctccgatgccatccagcatgcgtatttcgttgagcatgatgccgccgtcggtgacggtgccggttttgtcgaggttcaggcagtccacgcgtgcgagggtctccacggattcgagctcctgcacgagcgtgttcttgcgtgccaaacggatggcggcgagcgcgaagttgagcgaggtgagcagtacgaggccttcggggatcatgccgaccacgccagccacggcggacaccacggcggaacgccattggccggtggagacggctacgtcccaaccgccgaccgcgtgcacctgcgaccagatgagcagcacgcacagcggtacgacgaggaaggtcatgaatttgaggatggtgttgatgcccttgttgaggtcggacacggtctttttgtagaccttcgcctgcgcggtcaaggtggcggcatagctgtgcgcgccgaccgcgttgaccttgaccaaggccatgccggagaccgcggtggatccggaatagatgtcgtcgccttcgttcttgcgcacggtgcgcgattcgccagtgagcatggattcgtcgagttccaggccccaggtgcgcacgatctgcgcgtcggcgggaacctgttcgccggagcggatccacatgaggtcgccgagcacgatttcgttgtgcggcacttcgacgtccttgccgtcgcgtcgtacgagatagtcggaggctacgaggatggaaagcttgtcgagcgttcgtttggctttcagttcggtgatgatgccgatgccggtgttgatgaggatgacgaggccgaacacggcgtctctccatgatcccgtgaccaataccatgaccatggcggcgaagatgatgccgttgaacagggtgaacacgttggctcgcacgatgtcggcgaacgaacgtgacgtggacgatttgacggcgttgacctgcccgctttccgtaagggcggcgacttccgctgcggtgagccccttttcactggtttcaggcatggtttgactttcgctcatgctgccagcataccgcttggcgatgcgcgcccgcaggcttttcccgtaaagctccggcaaaattcagggttttctcagggtgcgttcagcgccacgcatccgaaccgattcgaactcacccgaatgcgtggagcggttcactgtttgccgccgtggctgatggtggtgacgaggattgttctgtcgtgcgggtcgttgttggctatgccggctaccgtgtcggcgagcggcgtcgcatccgtcatgcggtcgttgattgtgagcgtcgccgcgaacagcgtgctgtcggtcggcgtggcgatcgggttgagcagtgccactggaatgcccgcctgtcttgcggttgtcagcgtgtcgtaccagccgtcatggttcacgccggacacgtcgattcccgaaatgacgatgatgctgaccatgcgttgcgccatatcctcgaccgcttgccgggcggtgtcctgcatgtcgaccgtgccggcgaccggcagatacaccggcctgagcccgcccgcctccatggcatccaacgccaggcgatcggtctgttcgtcttgggagccgatcatggccacgtcgagactgttgcggtccttcatgctgtgggcgactgcatcgcctgcggactgcgtatctcccaccgcggcattgttcggcgtgcagccggccagcatggagatgccgaagacggctgcaaggagaccggctgcggcacgccgcgcgaaaccggtcatcgtgtggctttcctgaatagcgccaccgtttcgacatggtgggtggtcggatagatgtcgaatgcgcgaatatcggcaagatcgtatccgagcgaggccaatgtggcggtgtcgcgtgccagcgatgccgggtcacaggcgatgtatacgacgcttcgcgcgccggattcggcgatctgcctgcataccttcgcacgtgcgccggcacgcggcggatcaagcaccacgatatcgggtttggccaaatcgttgcgtacgttggcaagcgtcttggccacatcgcccacacgggcgtcgacattgcccaaatggatggccctcagattgcgttgcgcgtgtttgacagcggtcttgccaccttccacgctcagcatgcgcgtgcggccggcgcttaacgtggccaacggcagcgtgaacaggccggaaccggaatacaaatcccacaggcatgcggaagcggcgccgtcaagctcgccatgcaccaaggacatcacatggccggtcaacgcgatcggcgcgtgacggtgcatctgccagaatccgccggcgtccacaccatattcgaattcacgtccgcacaccgtcaccttttcggtaagctcgcgattgcccgccgtcacctcgccatcgacgagcacggcgtagttgtcggcgattttggcattgccgcgaggctcgggaacagacagacgaatctgcgatccgggagtgaatcccccatcccacacgtgttccttctcggccacgttaagcaacgcgcgactggccaacggcatggtgtcgatcggcacacgcacgtgggtgccgcgtctgcgcatagacggtcggccgttctcgtccgcgatcatctcgatgcgggtacgccagtgcagcccctgctccgcctcatcctcgggcatgcgctcgatcggcacgtcaacgtcgacatggccgagacgtctcatctgttcggcgatggacatggatttccatttaagctgtccgggcagtgagacgtgcaccaaatcggcaccgccgacgccgccgcccatggcaagcggacccgccaacggccatacgggttcgacgcggtcctcgctggcttccagcacttccgtcacttcgccagtccaaaaacggtcctcgcgatcatgtggctcgtccaacacgacgcgtaccagctcgcccggcaacgcgaatcgcacgaacacgacgcgtccgtcgatgtggccgacgcaacggccttggtcggcgtatcgttcgatgcggatggtcgattccatcagtgctgttcctccgtttcgttgttgtcgtccatcgcgtcggcgtttggttcggccaacgtcttatgccgatgcatgggggtggccacgatgaggtacgacacccagatggccaacgcccagaacggaatgcccatgagcagacgtgcagtgccgagccagccgacctggttggacaggtacaacggcacctgcaccaccagtcgtagggagaacacgccgatccacaacgcggtgatgatggtgtacgcgcggttcaatgccttgtcgccacgccaatcggcaagccatgcgcgcagatgctcggttggcagtgtccggatgaattcgatcaccaagccaagtcccggtacacgtaccatcaacgaaatggcgagcagcacgatgtagaaggcgttggtcaggaatccgaacatgtagtagttgcgcgcctcgtggctgttccatgcccagatcaggcagatgccgactgccagaaggccggagacggcgcccatgacggattggcgttggcataggcggacgatcacctgcagtacggcgagggctgcggatacgccgatggtcagatgcaggtcggaggtgatgacgaacatcaccacgaacaccacgcccggcagcatcgattcgacgacgccgcgcggaccgccgatcgcgtcgatgacggagaaatcgtcggcatcgtcggcgtcggcgagcgcgccgaggccggttcttttcttggtttcggtttcagccatgcgtttgtgttttcgtggtcgtcgttcgctcagcgcacttcggagaacatcggtccacgcgacaacgtggtcttgacctcgacctgctggtcggagtcaaacggtcccttcggctggcctggaatgtccatcgtcctgcctgcctgttcggcttcggcggcttccttggcggccttgcgttcggccggggcgaccggcggatgcatcgggatgaggtcacgcggggccagtgggtcctcgccgcgttccacgacgatgttggagaaaagctggttcagcgccttggtttcggcgtggtccggatcggtggcggctttgccggagaaaatgccgcgcagcatccaccgcggtccgtccacaccgacgatgcgggtgacgaccttgcgtccgcccttgaccacgaccggcagtgtcagttcgatgccgaacacgccgtcggtctccttggcgtctttgttggcctcaaccaggtcggcgcgcacgtcatcccacagtcccatggtcttcggcgcggcgaaggcttcgatctccacgctggaggatccgtaggtgatggtggtgccgagcacctgctgggtggcgcggttggccttcacgcgcagttcgatgccttggaggaacggcagatagtaggcgcccatgtcgaggtattcgtcatagtcgggcacgttctcgtcgtcgacgtcccacggaccgtgctcatcgccacggccgtcgtactcatcggacggttccggaaggatggtttcctgaattccaccggcgggcgcctcggcggtttcggagatggcctcatcggccttgtcgttctcttcggcggcggcttcagcggcttcctcgctctgacgcttcttcttgccgaatccaaacagtcccatgatgttcctcatttcattacggttgcaaccgtgactagcctagcacccatgcttaatacgggctgggaatcggagtgtgtcctcccgttgcccggcattggccggatggcggccgcaaaaactcacacgtcgtaggtgatgctcagcggcgcatggtccgaccatcgcaggtcgtaggtcggagctttgtcgatgacgaatccgcgggccgtttcggcgagttcgggtgtggcgaactggtagtcgatcctccagccgacgttgttgtcgaaggcgcggccccgctggctccaccaggtgtacggtccttggatgtctccgcacagggaacgcatcacatccacgaattccaactcccccagccatttgtccacgtaggcgcgttcctcgggcaggaagccggcgtgcttctcgttggctttcgcgttcttgatgtcgagcggcgtgtgcgcgatgttgaaatcgccgcacaataccgcctgcttgccgccgtgcgccgcttcatcgcgcagttgtcccatacgtaccagcatggtgtcgaggaaacggtatttctgcttcattttctccggatcgtcggtgttgccggcgtgcacgtacacgcatacgacagtgacggtgtacccttgcggggtcttcacatccgcttcgatccaacggccggaatcgacgtcctcggcaagtcccggcagtccgtagcgcttgtcgatgacgggcagcgcggagagcagaccgacgccggcgcgtcccttgatacggcagatctcgttcatgcgatcaagcccgctttggtcggcgatgcgtccggcggtcgcgtattcgaagccgaattcgtcgaagatggggtcgatttcgttttgcggggcgcgtacttcctgcatgcaccacacgtccggcgtgttcttcgcggcccattgctcgatgcctttgcgtttcgccgcgcggattccattcacattcgatgtcgtgattgtgatcgtcatagcgccttagcctagccggaatacaagaaaacctcccttgtgggaagggaggttttccagatggctgacgcgatcagtcgagtccgagctgcagcttgccgcctgggatggcgtccagcaggtcgcgggtgtactgcttcttcggatggtcgaagacctcgtcggtggtggcatgctccaccagcttgccgtgctgcatcaccacgacctcatcggcgatctgacgcaccaccgccagatcatgggtgatgaacaggtagctcagtcccttttccgcctgcaggtcgttgagcaggcgaagcacctggtcctgcaccagcacgtccaatgcggagacggcctcgtcgcagacgatcacatccggatcgagggccatggcgcgcgcgatggcgatgcgctgcctttggccgccggaaagctcgttcgaataacggctcatcaccgattccggcagttccaccatgtcgatgagctcgcgcacacgcttggcacggctcttcttgtctccgatgccgtggatgcgcagcggctcctcgatggaccggtagatggagtacatggggtcgagcgatccgtacgggttctggaacaccggctgcacatgacgtcggaagtcaagcaactccttgcccttgaatccggagatgtctttgccgtcgtaggtgacggtgccggcggtcggctcaagcagtttcagcaccatgttggccacggtggatttgccggaaccggattcgccgacgatggccaatgtggtgcccttcttgatggagaagctcacatcgtcgaccgccttgaacatctccttcttgcgcggcagtttgaattccttggtcaggtgatccaccgtgatgatggcttcgcccttcttcagggaatcctcgttcaccgcgtgctccatgaccgcggtggcgtcgccgccatgttccttgacggagatgatgcgctgcgatgccaaggacggcgcagctgcgaccagacgcttggtgtacggatgctgcggatgctgcagcacttccagtgaaggaccggattccacgacctggcccttgtacatgaccacgatatgctgggcgcgttccgcggccagaccgagatcgtgggtgatgaacagcaccgcggttcccagggaatcggtcagcatgtgcagatggtcgaggatcttcttctgcacggtcacgtcgagcgcggaggtcggctcgtcggcgatgagcagttccggacggcaggccagaccgatggcgatcagcgcacgctgacgcatgccgccggagaattcgtgcgggaactggcgggcacgggtggcggcgtcaggcagaccggcctcgggcagcagaccggcgatgcggtcgcccatggtggagccgaccacatacttcttggcgatgtaccatgcgtcatcgtccttcaccccggctttgatcaggccatcggccacacgccagcgggtttcggatcccggaacccattcctcggcgaaccgggccatgatcctgtcaagctcgtcaccgctcttgccgatcttgacaagagcctccttggccgcggcgatcagatcaggcagttccttggaaccaaggaaggtctcatcgtcattgcccttgagctccacttcgtcaccggccagggccttggcgaattcggaacgcttttcgtggtcgatgtccatgttgttggccaccaacgcttccttgacctgggtgccgatgcgccacaccgggttcaggttgctcatcggatcctgcgggacaagacccatcttgctaccacggagcttgtcgaaatccttctgcttgaagccggagatctcctggccatcaagcttgatggagccgccgaccacatggccggttcccggaagcaggccaagcacggccatggcggaagtggatttgccggaaccggattcgccgacgatggccacccactggccgggatacacgctgaaggacgagttgcgcacggcatgcacggccttgccttcatcggtggtgaagtcgacctggaggttcttgacctccaacagcggcccgtgggcgcgctgcatggcctcgaggttgttctcggtattcatttcagtcatcgaatatcccttcacttacactcaggccgtacggctcttcggatcgagcgcgtccttgacggcgtcgcccatcatgatgaatgccagcacggtgatggccagcgcggcggacgggtagaacagcaccatcgggtcagtacgcaggatggactgcgcgttggagatgtctccgccccagctgaccgtggtggtgggcaggccgacgcccaggaagctcagcgtggcctcgagcacgatgtaggtggccagcgaggtggtgccgaccacgatgatcggagccagcgaattcggcaggatgtggcggaacaggttgcggatcggggtggatcccagagcggtggacgccgtgttgaattcaaggttcttggcttccatcacagcacctcgcgcgattcgtgccacggaggtccagccgaacagcatcatcaccagaatgatcttccagatggagctgctcgttttgaacatctggagcaccacgatggcgccaagcagaatcggcagcgcgaggaagatatcggtcagtcggctcagcacggcgtcgacccatcctccgaagaagccggcgattgcgccgatcagcgttccgagcagcaccaccagcagtgtggcgaacacgccgacgctcagcgaggtgcgggtgccgtagaccacacgggagtatacgtcgcaaccttgcaggtcgaagccgaacggatggcctgaggaagccggctcaagggaattgtcgagcgtgcagtagttcgggttctgcttggtcaacacgctcgggaacagcgccacgaacacgatgaagatgatcagcagtccggagatgatgaacagcgggttcttacgcagggttcgccatgcgtcggcccacatgttcgaagccggtgcggattcgtccatcgagtcgacggccttcaggggcgtctcatcgagcggtgccacatagcgttcctgtcccggaagcacggtggaaggattggtctcattcatttcggtcatttcttgttccctccctcgactcacgcgtaacggattcgcggatcaagcgcggcgtacagcatgtcgaccagcagattgcaaaccacgaagatcagcatgagcagcgtcacgatggacaccaccaggttgccttctcccttgaggatgctctgataggtcaggtagccgatgccatgcacgttgaagatggtttcggagatcatcgcgccgcccatcagtgcgccaagatcctggcccagataggtgacgacggggatcatggagttgcgcagcacgtggcgcagcatgacggatttgttgtccatgcccttggcgcgcgcggtgcgcacatagtcgagggcgatgttggacgaaatctccgtacggctcagacggatgatgtacgccatcgataccgagccaagcaccatggccggcatcagcagatcaaggaatcctggattcgctccggcggtgaccggcagcagatgccacttcacaccgaggaagtactggcagaggaagccggtgacgaaggtcggcacggagatgagcagcagggagaagatcaggatgacggtatcgcaccacttgcccttcttcaggccggagatcacaccgaagatcacgccgaaaaccgcttcgaacacgaaggccatcagggcgagcttgatggtcacggggaaggcgcggccgatcacgtcgatgacaagctgtccggagaaggtcttgccgaagtcgagggtcagcgcgttcttcaggaacagcagatactggacgatgaacggcttgtccagattgtattcggcacggatctgggccgcgaccgcttcgttgaccggcttgtcgccgaacatcgccttgaccgggtcgcccggcaacgcgaacaccagggcatacaccagaagcgtcgtgccgagaaccacagggatcatctgcagaatgcgtcgcagaagatacttgcccattggtttctccttttgattactcactcgttcgccagccgtttgcggcttcgtcccctacgctcacgcgtataggacatgaggcccggggcggccggcgcttgccccgttacgtatcagtgatactgcaccacaatgctttatattgcagtttcatgaaagacagctgaaaatataccccacgcgcggacatcttctgttgatgtcgcatgtccagccgtcatggacctccgatggaagccccgtttattacgcggaaaggaaggaacggatattcgaatccgttccttccttcatgccgatcctacgaaatcaaaatcagagaacggctcacttgccggacttggtcatgttctcgtagaccggcaggttctgccagttcatctcgaagccggagacaccggtcgaggccacaccataggcattggcgtagtacagcggaacggccggcaggtcgttgagcagcacttcctgtgcctgctggtacagcttgttggcgtctgcgacggacttggaggcagcggccttgtcgcacagcgcatcgaactccgggttcttgtagtcgccatcgttggagccgttgccatcggcagcggcggaggcgaagttctgcaccaggtagttttcggcggacgggtaatccggctgccagccgctacggaacgcgccgttcaccttgcggtcggacacggcggtgcggaaatcgttgaaggtcgggtacgggttggtggcggccacgccggcgcccagcacgttgttgatggagttgaccacggcggtgtagatgacttcgtggccaccatcggcgttgtaggcgaaggtgagcttgtcatcggaggtccacgggctgatggcgttggccttcgcccacagttccttggccttcttctcgttgtacttcaggttgccggagcccttgagggaatcggagtagcccggggtcagcggggaggtgaagtcggcggccggggtgccggtgccgttgagcaccttcttgcagatgttctcgcggttgatggccatggagacggcctggcgacgcagggtgccttcctcggtgtcggcctcgaagtgcttcagcttggccgggatggtgaactgctggatgacggagccggccttgttgtaggcctgtacggtggagtccttctggaaggtcttggtggcggaggccgggacggactccatcacgtcgagggaaccggactggatgtcggcgtaggcggcctcatccttggtgtagaccttgaaggtcacgccgtcgttcttggcgacgcggttgcccttgtagtcggggttcttcaccagcacgatctggttgtcgtggtcccaggactggaacttgtacgggccgttgccgaccggcttctcgccgaaggccttcggatccttgaagaaggattccggcagcggagcgaatgcggtgtagccgaccttgacggcgaacacggagtcggaacggttcaggtcgacggtgaactcatggtcgttgacgaccttcaggccctcgagctgttcgtcgcccttgagcttgtctccatcctggagcttgtcgtagcccttgatggtggagaagaaggaggagccgagctgtgcgttcttggcgttggccgtgtagctccatgccttggtgaaggattcggcggtcaccggggtgccgtcggtgaacttccaaccatccttgagcttgatggtgtactgggtggcgtcatcgttggacttgatggactccgccacttcgttggaggcgttgcccttggcgtcgaaggaaatcagacgtgcgaacagcaggtcgagcggcttgccgccgccggtctcgttgcagtcgcccgggatgagcgggttctgcggttcggaattgtatgcggtgatgacgttggaacccttgtcagcggtggagtcaccgttggaagagccgcaaccgctgagcagcatgccgaatgcgcatgcggccgcagcgaaagccagagctttcttcttcatggaattcatattctccttatccattatttccagagccgtaagaccctgctcaaaaagaaggcgggcgtcaataccgtggcatcaacgtccgtcttcgttctgatagtaggttcattatcactcgattgagggacaaccgctccatatccgagggaggcccatgcaaaatagccaaatcaaaactcatcatctgataaaacaatccgtttttccctcttatcgccggaacaacttatccgcatcgtgcgtatggacggacgcggacatatccgttcgctgtcagcgtactttgccgatgcgcgtcacgcccgtggaaacgcctgcccgtatcgcgccttcaactgttcgatggacacgtgtgtgtaacgctgcgtggtcttcagcgaggaatgccccagcatctcctgcacctcacgcaggtccgctcccccgtcgagcatatgggtcgccgcactgtggcgcaacgcatgcggactgatgtcaggcacgccggcctcccgtgcccggtcgtgcaccaccttgcgcaccatacgttgaccgatccgcccgccctgcgatcccaaaaagaacgcgtcgtccgacatgtcaccgcatagtacgggacggccatgttccagccaatcgcgcaaggccttgtcggctggtgcgccgaatggcatgacacgctgcttgtcgcctttgccggtcactttcaccgtgcggttgccgaatgtcacgtcggccacgtcgagtccgaccagttccgccacacgcatgccggtggcatagagcagttccagcatggccgcgtcacgcagcgcgatcgcctgttttttcatattcggttcctgcgatcgcgcctccatgccgtcctcatcaacgcggtccatcagctgctgcgcctgcgtttcgttcaataccgccggcagcgtatcggggattttcggcgtctgcaacgaagccgccgggttggcggacgccatgtcatggtcgtacgcccatgcgaagaatccacgcacggcgacggttttgcgcgccatgctgctgcgtgcgtgatttttggacgatttggccatccacaggcgcaaatcctcgatggtcacctcattcagatccacgcaaccctgtttccgcaacgccaccaagcattcctcgacatcgctgcggtacgccctacgggtgtttgcgctcaaccctcggttggctttcagataggcgtcgaatccgtccaacgcatcatcgaaacacatgcaaaccaccttccgcttcgtctgaaatgaacagacaccacgcagacaccgtataaatgccattccgcagcgcgatcgaatgtcatctcacgcgatggcacgattccattatgtccccataccgatagactgatgacgattaggcatcctacgaacaggcggtattatgactcgtcattccattcatgacgtacagcatccgacagccgaaaaccccgatgatgggattgtggcccgcgccatcgacctgaccaaggtctacggctcaaaagacaacgaagtgatggcgttggatcatgtgaatgtggaattcaagcgcggtgaaatgaccgccatcatgggcccttccggttccggcaagtccacgctcatgcattgcatggccgggctcgacaccccttcgtccggcaaggtgatcgtggagggactcgaggtctcctccatgaaccagaagcagttgacggacctgcgccgcgagcagatcgggttcatcttccaatcgttcaatctggtgccgacgctgtccgccgaagaaaacatcctgctgccgttgcagatcgcgaaacgtccgatcgaccgcgaatggttcaaccaggtggtcaaggtggtcggtctcgaaaagcgtcttacccaccgtccaagccagctgtccggcggccagcagcagcgtgtggcctgcgcccgcgccatcatggcacgaccgtccgtgatcttcgccgacgagccgaccggcaacctcgactcgcgctccagccgtgaagtgcttggcttcctgcgtgattcggtacgcgactacggccagtcgatcgtcatggtcacccacgatccgcgtgcggcctccttcgcggaccgtgtgctggtactcaccgacggcaacatcacccgcgacatgcagcatccgacgtacaacgagattcttgaggtgttcgccggcgacgacgacatcgacgatgtttccaagtacgccgcctccaccgccgttccgaccgtgacggaggactcgcaggcatgattcgcataggattgcgcgacgcgcgcagccatttcggccgtttcatcatgtcgatcgtggccatcgcgctcggcgtgagtttcgtggtcggctcgttctgtttccgcgaaatgctcaacaaccaggtttcacagatgatgtccaccaatgcggaccatgacgtgtacgtgcgcggttcgcaggagaagaaaaaagattcgtcggcgatgtcgatgggatcgacgaaaagctacaacgatgtcgacgtcgatctggcgggcacgatagccaaggtcgacggtgtttcctcggcacgcgtcgtgcacatgctgtccggcgtggtgctgctcgacaagcatggcgatgcggtgaccaccatggggtctccgacgctcgccataggcatgggcaagtcgtcgccgtggcggtccgccaagttcacgaccggcacgtggccgaagaacggcgatgagatcgcccttcattccttcgccgccgaacagtcgggtctgaaggtcggcgataagacgaaaatcgtctatccggacggcgctcataaggtgaccgtcagcggcatcttcaccaccgatgccagccaggcaggcgccatcatcatcgccatcgatcccgtaacggccaaggaaaaagccagcaagcagtcggacgatcccgacaagacgtcgttgatcagcgtctacggcaataagaccacgccgcttgacgacaacgcgcagcagcagctggcggaccgtatcaacaaggcgctgccgagatcggcgaaggcgcatgccatcaccggtgacgaataccgtgacgaatcaaccaaatccacgcaggacgcgctcggcttcatccaaccgcttattctgattttcgcggtgatcgcattgtttgtcggctcgttcatcatcgccaacacgttctccatgatcgtgcgcgagtcgatgcgcggctatgcgctgctgcgttccatcggcgcttctcccctgcaagtgttctccacggtgatcgtgcaagctctgttgctgggcctggtaggttcgctcgcaggcatcgggctcggctggggcatggtcaaactcatcgcatccggtttggcgaatatgggtatgccattgaccggcgccaccaatccgaccgtttccgacatgctcgtcggccttgtggtcggcattgtggtgacgttgatcggtgcggccctgccggcgcgaaatgcggcgcttgccccgccgattcaggcgatgaacgaaaccgtcaatccggaaaagcccgtcctcgcacgtggcatcctcggcaccgtcatggtgctgttgggcttcctgagctggggtttcacctacgctttggccgccgcggatggtgacggcggtccgacgccgtggaaggcgctcaacagtatcgctgtcggctggccgctcggtattggcgcggcgctggccgtgatcggcgtgattgtggcgggaccggcatacgtgtccaccgcgggcgcggtgctcggctggctgccatcgaaggccttcaccgtgactgggcgtctcgcgcaacgtaacatttctcgttcgaaacgtcgcacgtccaacaccgcagccgccctgttcgtgggagtggcgattgtcagctgtctgggcgtggtggccacgtcggcgaaggcttcggtcaattcgctggtggataccgggctcaaagccgatttcgccgtatcttcggcttcggccgggcagattcccgaccaggccatcaaagacatcaaaaaggtcgatggcgtgaatcatgtggtgtcgaaccgtgtggtgcttggtgtgaaatatgacggcaaagccatcaacgggttcacgttcgccacacagccggagctgttcaccaagatcttcgccgccgaaaccaccgaaggtgatgccgctgccgcgttgaaggatggcaagctgctcgtcggcaagaccattgccgacgatcgtggatggcatgtgggtcagaaggtcaaggccacggccgagaacatcgtggtagacaaggaggccacagccaaggcgcaggccgattaccaggccaaggtgcaggcgcatgtgcaggaattgcagtcgcaggcccagcaattggccgcatccggcgacttggcaggagcgcaggccaaggcttcggaaatcgaacagtacacgaacgacgccaagaacgtcgatccgaaaacgctggtcaagacgaagaaggtcaccaccggaaagacgctgaccatcggcgcgatcgtgtcgaattccgtataccgcgatttcgcgatcgtcaacgacgatttggccgagcagatcggcaacaagcagaccatgttcgtcatgcaggcgttcgtcacggacaagcggggcgccgacacggcccaagtcaagaaggccctgaagaaaacaatcaagaaatactacacaatcgtcgtgttcgatcgtgacgagtacaagtccacgatgagctcgatgatcgatcagatgctcatggtcctgtacgcgttgctggctttgtccatcatcatcgccattttcggcatcgtgaacacgctggcgttgagcgtgtcggaacgcaccaaggagattggtctgctccgtgccatcggcacgtcacgtggccaggtgcgtggcatgcttggcatcgaagcggcgatcatctccgtgttcggcacggtgttgggtttgatcgtcggcgtcgccgcgggagtggtgattcgtgcggtctacgcgtccgaaggtttggagacgctggcgattccgtggttgcagctgctcgtgttcctgctgctgtcgattgtggtcggtctggtgtccagcatctcccccgcctcccgcgcgttgaagcagccggtccttgacgccgtggcgagcgagtgagacagttggagcggaacatcgaaaggaggcagcaatgcctattcccaatgagattccagtaggagcgcgcatcgtggtgcgcaccttggaaggcgtcgatcctaccgatcatcgtatgaagttccgcgattacgtaggccacgtgcgttcgtgggacggtcagaaactggagatgacgcgcgatgcggcggcgaacggctcacgtcccgagcagcgtgtcacgattcccgccgacgaaatcgtgacgatcaagccggtgccggaacgttccatgactcggccacgtccgtagtcgcgtacctccccctaccgcgcgcaaagacaagagcgccgcaatcgcactgattttctgcgattgcggcgcttttgcatagcgatggcgtcagtcgtcagaccacggaacgcgcctgcgcgatcgcggtacgctcgccgtcgaatcgcacgatatgctcgcctctgcgggcggattccagcagcgtgcgctgccaatcgttttcgggaatcgacagttcgaccgtcgcgcaatgttcggcgtactccggctgcctgctggcggccttgtagtcgcggaacggttggccttgggcgaagaaacggtccatttgcttcacgtcgccttccgtagggcgcacgccggtatcggccatgtcatgcagcacgttggccaccaacgtcaatcggttggccatgttgcgtagcaaagtctccacgttggccgcgtcctcctccaccatggcacgtgtgcggttcggatcggtcagcgccacgcgcgtcatgtcacgccaggacccggctgcgagcgcggccgcgatgttgcggttcgggttggccaccagctcgttgatcatggcggtggcgatgacgtgaggcatatgtgagatgagcgcggcgcaacggtcatgggtggcgtcgtcaagtacgatgagccggttgccgcaacggttcacgatcatgtcggccacggcgcggaaccggcggtattcggtgtgttcgtcgacggtgatggcccagagcgcgtcgtcatagagtgtcgggtcggatgcctcccagccagacagttcgttgccggccatcgggtgtgctccgacgtagcagccgtcaagaccaatggctttgacttggtcgcggaccatgcctttgacgctgcccacgtcggtgagcgtggttgtttccatgtcgatcaatggtttcaatgcgccgaggatttcgggcatggccttgagcgggttgcacagtacgagcacgttcggtttggtttcggcgagtgccgccaaggtgggtttgcagatgatgccgtcggcttcggcggtggcgtaggggcggtcgttgtggttccatgcggtcacttcgcagccggcgttgacgagtcggcgtgccagtgatcctccgatgaggccgagtcctacgattgcgatgcgtggcttcaccacatcagctcccttctgacggtttcgtcgttctgccaatcgtccggcaggtggctgtcgtcgagtcgtacgccgccttgcggcagcatccatgaggtgacgggcgggttggggcgttccctgcgcgggtagacggcgagtgttttggcccagtcgccatgttctgcgatttccacaagcgcgtcgcggaaacgttcctcccaaggggcggcgtcgagggtgacgatgaagctgtatgtgccggtgcgtcctttgatgggccgtgagatgaagctggtcatgttcagtcccgcgtcacggaacacgtcgagcaggttggcgagcacgccgggcccggtaaccaacggaatcagcgtcaacaccgattcgtattcaagattcgcttcggaccgtggtttggacaagagttccgcgacttccccgcgtggagcgagcaccaggaaatcggtggcagcgccttggtaatcctggatggcggtgccgatgcgggtgatgtcgtacagttcgccgcagatggcgggaccgaaggcgatttcacctgggataaggtcccggcaggccgccgcgttggatgtggccggctgtgtggagagccgatgttcggcgatgaatcgtttgcattgcgcgagaccgtgcggatgggcggtggcgatgcgcgcttcggctggatcggctccttgcgccacgtatgcgtcgaattcgacgttcacaccgacgcgtgcgaatccgacaaggtccttcgcgtcgatcagggcgtcgaggttagggaccacgtacccttcgacgttgttctcccaggccacgattccccagccgtcgccgtgctgtgcggcgtcaagaatctgcggcacatcgtccatgggcatcaggtcgaagccttgcggttcgagccgtgccaactcttgggcggcattgacggccgcctgatgggtgaaggtgccttgtggccccagatagaacagcttgcgtgcgctcattgccgcctgtgcctccttgttgcgggtcatcctaagcaccttagcgcattcgcgaggctgtggaggggtctagtccaccggttgggcggtgtcatggtccggttcagacgattcgttctggtcatattccgtggagtcatcctcagtgcgcggcggcatcgtgaaccagcttttgggcagcgccagcatgatcaatggaatcagcaccacgccgtatagccagaaatagccggcgttgttgctgaaatacggcaacgtcgccgtctcgccgaatccgacgggaatcatggcgtccccgcccggaccgtaaccggccatgacggtccagaccaccagtgacgaactgatcagatgcaatgcgaggcccgacacgccatcacgtgaacgcgccgaccatgtcgagatgatgaccagagcatatgcgatcacaagaccgtagggaatattcgccgacgcgcccatgcggtgcgccatcgtgccgatcacgccgacgacggcaccggcgagcaggtcaaccaaaaaccgcgcccataccggtagacgatgcgaccacggcagcagcctgcggtcgatgccgtcctgtgattgcgattgcggttccggctgtgtttcctgcgtgcgttgcgtcatgtcctccactatgccctacgttccttacaaaacagcaagaaaggcaagagatacgcggaaaaccgccgacatctcttgcctttcttaagcgtttagcgcactagcggaacacactaccgtgcccgcgaagcgccaaaacaatgcgaagaatcacttgttattctgagcgttgttctggcgacgctgcttggcgcgccacttgtaccaatcctcacggctcagaatgatcttgcgcacgcggatggattccggggtgacttccacgcactcgtcctcgttggcaaagtccagggactcttcgaggctcatcttgatcggcggggtcagggtttccagcacgtctgctgtggcggaacgcatgttggtcatgtgcttggccagcgtgatgttcacatccagctcgtccggcttgttgttgatgccgacgacctggccctcgtacaccggggactgcggctcgacgaagaagttgccacgtgcctgcagacgctgcatggcgtacggagtggcgacgccctgacggtcgcagaccatggagccgttctggcgggtcacgatctggccggcccacggagcgtagccagcggagatggaggaggcgatgccggtgccgcgggtggcggacagcaacgcggtgcggaaaccgatcagaccacgggacggcacggtgaactgcagacggacccagccggtgccgtggttggtcatgttgtccatgcggcccttgcggtcggcgagcagctgggtgacggcgcccatgtactcttccggcacgtcgatggtggtgttttccatcggctcgttgaccacgccgtcgatggtcttggtgaccacctgcggacggccgacggtcagctcgaagccttcacggcgcatctgctcggcaagcacggccagtgcgagttcgccacggccctgcacttcccaggcgtccggacggtcggtcggcagcaccttgatggacacgttgccgatgagctcgcgatcgaggcggtccttgatcatgcgggcggtaagcttgtggtccttgccttcggtgccggcaagcggggaatcgttgatgccgaaggtcatggagatggccgggtcgtcaacgtggatgagcggcagcggacgcggatcgtccgggtcgacgatggtctcgccaatcatgatgtcgttcacgccggcgacggcgacgatgtcgccagggcctgcggattcgaccggggtgcgctccaggccctgcgtacgcagcagctcggacacgcggaagttctcgatggagccgtccacacgggacagaccgtaggtcttgcccttctcaagggtgccgttgtagatgcggaccagaccgagtcggccgaggaagtcggaggaatcgatgttggcgacgtgggcctgcagcggcgcgccttcctcgtattccggagccggaatgttcttgatgatggcctcgaacagcggctcgaggttgtcgttgtccggcaggccgccgttttccggctggttttcggaagcgtaaccggccttggcggcgcagtagatgaccggaaggtcgaagagggaatcctcatcgaggtcgatgccttcctcgatgacgtcctgggccaggccgagcagcaggtcggaggactcaccgacgacttcggagattcgggcgtccggacgatcggtcttgttcacgcacaggatgaccggaagcttggcttcgagggccttgcgcagcacgaaacgggtctgcggcagcgggccctcggaagcgtcgacgagcagcacgacgccatcgaccatggagatgccacgctccacctcgccaccgaaatcggcgtggccaggggtatcgatgatgttgagggtgatgccttccggatggccgtacttggcggccagcgggccggtgtactgcaccgcggtgttcttggcgaggatggtgatgcccttctcgcgttccagatcgttggaatccatcacacggtccggaacttcctcacgctcgttgaacacgtgggactgggccagcatcgcgttgaccagggtggtcttaccgtgatcgacgtgtgccacaatcgctacatttcggatatcgccgcgaaccgccatcgaaacctctcttagtgttgctgttttcttacgtaaacgttcggtacgtacatgctatcggtacttaaaaatccgtacttacacacaaaccgagccaattctagcgaagcattacgacacatggaaaacggcggacctgtcagatcatgccgacaggcccgccgtcaatcgcgcgaagagacgcgcggaccttaatcctcaagctccttgccagtgcgttcaggcaggcacagggccgccacgcaggcgagaatgaacgccacggcgaaaacgatgaacgccacggccttgttgccaccggacaaggtcaggaaccatggcatcagcagcggcgcgatgatcgcggccacacgaccgcaagccgcggctgcaccggaggcggcgccacgcagacgcgtcggatagatttccggagtcaccgcgtacaacacgccccaagcgccaaggttggacgcggacagcagcatgccgaagcccagcacagcggccacggaaccggcttgggagaaggcgaacgctgccacggcggacacggcgaggaacacgctcagggtcttcctgcggccccagatctccaccagccatgccgcgaggaagtagccgggcagctgtgcgatggcgatggcgagcgtgtagccgaacgacttggtcagcgaaccgaactggtcggccagtagagacggcatccacgtgaacgcgccgtagtaggagaagttcacgaagaaccatgtggcccagatggctgcggtgcgcgcaagatacttcttgccgaacagctcgcgggttttgatcttcggcagcggctcacccttcggggatgcgaccggttcgacgcctccggcctgttcgaagtagcgcacggcctgctcggcctcatcctcacgtcccttggattcgaggaatcgcacggactcagggatatgaatgcgcgtcacgatggcgtacagcagcggcaatgctccgatgagcagcgcccagcgccatccccaatcgccggtgttaggaatgacgaaatagccgatgcaggcggcgatgatccagccgattgcccagaaggattccagcaacaccgtcatacggccgcgttgtttggtcggagagaattccgagaccaatgtggaggcgaccggcagctcggcgcccaggccgaggccgatgaccagtcgagcgatcagcagagccgccagcgaccatgacaacgccataccgccattggccaggccgaaaatcaccagcgtcgcggagaagaccgtcttgcggccaacgcggtcggccacgaagccgccaagcgcggcgccgatcgccattccgacgaaaccgatggacagcacccagcttttctcggtcggcgtcagattgaaatgcgggtcagccgcgatggcggccacgacgaacgacaccagaccaacgtccatcgcgtcgaacgcccatccaatacccgaagccaccaacagcttcctgtgcgccttgttgaacggcagtcggtcaagacgctcgttgcgagtcagcgagacctctcccccgacggtttgttgcgatgcggacatcaacacccctttatcattgttttcctattgtgtcgtgagctcgttcaagcccgacgatggcaggcgatcacgccgtcatcaatgcggataacgcgtcgtcatcctggaaagcaattcgagtgtcgtccgattcggatgccgttccggcttcggtccacaaatccgttcccggcttccggctgtaccggtagaccgccgccggcctgttacggccgatccgcagtttctcaccggtgtcttccaacagtccggaagcgagcattttacggcggaaattcgccaaatcgatacgctgtccggcaatcgcctcgtacacgtcatgcagttggctcaacgtgaatcgctcgcccaccaatcgagtggcgatgtcaggcgattcgattttgccgcgaagccggttcatggcgtattcgacgatggtgcgatggtcgaacgcaagttccggaagatggttgacggggaaccacttgacgttgtcccctccggcgaagtcgattcgtccatcggcctcgcccaccagggcccagtacacgatggacaccatcggcagaccgccatgcgaacgtgccggatcgccgaacgtgtaaagctgctcaagatatttcggatgcagcgacgtcgtcgattccagtgcggcatacgccgactgttccaatgaatggtcggccctcagaccgcctcccggcaacgcccattgcccccaaaaaggctgacggacgcgtttgaccagcggcatccacagggtggagcccatgccggacgaagcggcaccagcgcccacatctgactgcggaaccggtcccaaagccagaatcaccacggatacgccgacctgcggaggctgcttgcgccgttccgagacattgcccatgatcaattgatggcctcttccaatacttcgaattgcttacaggaaaggagtctaacacttatagtcaacatgactataagtgtgtcgagtcgctcataaacaccaagagcccccaacggggctcttgcaaagttcaggccacgatgtcgttggcgatcagctcgcgggccacttcacggtattccttcgccgtcttgtggttcggcgcgtagatggtgatcggcgcggccgccaccgtggaatccggcagcttgatggaacgcgaaatcacggaatggaacaccttgccttggaacgcctcgtagatacgctgcaacacctcctcgcaatgcaacgtcctggtgtacatggtcaccagcacgccatacacttcaaggctcggattgatgcgcgactgcaccttctcgatggattgcatgagcagcgccacgccacgcagcgcgaagaattcggcagcgaccggaatgatcacaccgtcggccgcggtcaacgcgttcaccgtcagcaggcccaacgatggctggcagtcgatgatgatcacgtcgtactcgtccttgacctggcgcagcacaccggcaagcacctgctcacgtcccacttcggtgaccagttgcacttcggcggcggacagatcgatgttggccggcataatgtcgagattctcgaaatcggtgtggtgaatcacgctgtgcacgtccatgcgcggattgaacaacgccgtgtacacggtgtcctccaccgcgttggcgttgatgccgagacccaccgtggcggcgccttgcggatcgaagtcgacgatcagcacgcgcctgccgtattggcttagcgcgccgccgatattgatggaactggtggtcttgccgacgccacccttctggttgcacatggcgatgacccttgccggaccgtgcgtctgcagcggctccggtgcgggaaacgtctcataatcacgtccaagcaaatccgtaggcataccgtttaccttaccaacatcctcgtgtcaaaaattccactgtttccatgctagcccatcatcgccgtcagaaacggcagcaacacatgcatctcatgctatcttgcccttggatgcgaggtcagatatgtctcgatgaggttctccgggcttacatgcgtgtagatctgcgtggtggtgacgctcgcgtgacccagcagttcctgcacggtgcgcacgtcggccccgccttggatcagatgcgtggcgaaggaatggcgcaatgtgtgcggatgcaggggcttgtcgatatgcgcgcgttccccggccgcacggatgatctcccacaccgattgccttgacagtcgtttgccgcgcttgttgaggaacaacgcgcgtcgttcggtgggccctttcgccttcgactcgagctgcggccgtccgtttttgaggtatcttgcgatcgcctcacatgcgtaactgccgaccggcaccagacgttgtttggagcctttgcccatcaatctcgcaacgttcgattccaagtcgacatcgtcaagattcgcgccgcacgcttccgacacgcgggctccggtggcgtacatgaattccagcaacgccttgtcgcgcagcatcgcgggatcgtcgggcatgtccgccatgccttcggattgaggccgattctgcgagacggggatcgcgtccagcaaactggccacctcgtccacagtgagcacgtcaggcagcgtcgtcgcgcctttgggagccttgacctgtgccgcaacgtcattggacaccacatgttcgttcagtgcgaagcgatggaatgcatggatgctggccagtcttcgtgccttgctgcgcgcggattctccggaatcgtcaagaaaggcgatgtatcgttccacgtcctgcgtggtcactgcattaaggtcttgaatgccttgcgtcgcaagccagccgttgtatttgcgcaggtccgagtcatatgcgcgcaccgtggctttcgcaagtcctcgttccacgtcgatgtacgcgaggaactgatcaatcaagcgttcgatatccgtcatcgtggtcctccgtttgcatcgtcatcatttgtcgtgtccgttccgtcacgctcccgtacggaacgcgttgcccacatggaggattccaaggacgttcgttccaggtggaagccgtcattggatggaaatcaacattccggaaagtctattcaagtatccggtatggggaacgcgatacgcaagaacccccgtccgcttgccggatcgggggttctgaagttcacaggtgaaccgtcggggaaactcaggcttccttcggagcgttcacgtcagccggaagagcagccttggcctgctcgacgatggccttgaaagcctccggatcggagacggccagctcggcgagagcgcgacgatccagctcgatgccggcaaggtgcaggccctggatgaagcggttgtaggtgatgccttcggcgcggacggcagcgttgatgcgctgaatccacagcttgcggaagtcgcccttgcgagccttgcggtcgcggaagttgtaggtaaaggagtgcagcagctgctccttggccttacggtacaggcgggagcgctggccgcggtagccggaagccctctcgagaacgacgcgacgcttcttgtgggcgtttactgcgcgcttgacacgtgccatatttgattcctcagctttctattaagtctttgtttctaagctctcgctatgctcagcgaccgagcagcttcttcatgttcttgctctgggaagtggccagaacaccgtcggccttcagctcacggcgcttacgagcggacttgtgctcgaggttgtggcgcattgcggagccggcgtgcatcagcttgccggaaccggtcacgcggacgcgcttggaagcggcggaattagttttcatcttcggcattgctgccctccttgtttgttacttcgtttcggaagtcttcggtttgtcggatgccacggcggctttggctgctgccgccgcctgagcctgggcctcctgcttggccgccaaacgggcggcctggcgggcctgacgctcggcacgggactgatcgccacgacgacgctgctcggactgggtatggaccttcttgcccttcggcgcaagcgtcatgatgatgttgcggccttcctgcttcggagcgaattcgacagtgccgtattcctccacttcgctggcgagacgctgcaacagctcgacgccgccaatcggtcgcgactgctcgcggccacgcagcatgatggtgaccttgaccttgtctccgccgttcaggaagcgcacaacatggcccttcttgacctcgaagtcatggtcgtcgatcttcagacggaagcgaatttccttgatttccgcggtgctctggttgcggcgcgcctcacgagctttgatcttctcgttgtacttgtacttgccgtaatcgatgagcttggcgaccggaggcttcgcgttgggcgccacctcgacgagatcgaggttcgcttcctttgccaggttcagtgcgacggaagtcgcgatgactcccacctgctcgccgttcgggccgatcagacgcacctgggagacgcgaatctcgtcgttaatgcgtggttcgtcgctgatgatgactccaatcctcatattccatgcaacggaacatcctttgattggcagttttccaaagtctcgatcgttcaaggcatgccaaaacgcatcacaacgcgccgtaaacccgtaagagcggcttacatatctcaccgagacgaccggtggaaggcatctgcctgaacccgaggccctgaaaggcttccaggtggggatatcccgctttcttgatttctcaagccttgtagataataccacaccccgggaccagcgcgtgtcgcaccggtcctggggtgttcgtcaccattcggacggcatccgctgtcaggcgatggcgatgacgtccggcttctcgccgtcgtgcacgaagtagacgtcgtaccacgtcaggaacgagtacacggtccagatcttgcggcgatcgtcggttttgccggcatagttgtcgtcgatcatcttcagcagcgcatcctggtcgaagaactggctgacgtaatcgcgttcgaacacggaacggacgtacttgtagaacttctcctcacgcagccacttcttgatcggcaccgggaagccaagcttctcacggtcgtaccattccttgggcagatgacgtcccgccgcctggcggaacgcgtatttcgtgttctcgtcggtgatgaggtacttggtaggcacctgctcggccacgcccatgagctccttgtcgagcagcggcacacgcaattccagcgaatgcgccatggtcatcttgtcggccttgagcagaatgtcacccggcatccactgatgcatgtcaaggtactgcttcttcttcagttcgctcagacccttgccttccacacgcgcatacgtcttgtcgacgatgctttgcacgctcggcgccttgcggtattcaggcttgagcagctgttcggactgcgattcctcaaacacacgtgcctgtccgatgaagctttcctcggccggcgcaagattggcgtacagatgccatgcgcccgggaaggtcttgcccttgcagaaccgggcgatcgccttgcgcgcgccggctggcagatgcgtgagccagcgagtcaccaccttgatgggcttgaatttggtgtgcacgccgtagtcgatgtatccggcgaacaactcgtcggcgccttcgccgctcagcaccaccttcacgtctttggcggccaatgcggacaggaagtacagcggcacgcagctcggattggagtccggctcgtcgagatgccattggatgcgcgggaacgcggcgaacgcctcctcgtcggtcaacgactcggcggtgttgttcagtttgagcagttccgccagttcgccggcctgctgcgattcgttgtacgtgcctttgccgaaaccgatcgaatacgtgtgctgcggacgcgccacggcggcgacgtagctggagtcgacaccgctcgacaggaaggagccgacctccacatcggcgatctggtgcgccttgacggaatcgcacaccgtctggtcgatcgagttcaccagctcgcccagcttctgcttgccttcgcggaaatcctcgtcgtaataccggtggatgtccatcttgccatcccggtacgtgaaatagtgcccttccggcagcttgtagacgcctttgaagaaggtctcaccgatcgccggatactggaaggtcatatacggcttcaacgcctcggcgttgagctccttgacgaaatcggggtggcgcaacaggctcttgatctccgacgcgtacatgaacgtgccgttcatcttcgcatagtagaagggcttgatgccgaaatggtcgcgcgcgccgaacagctcctgcttgttcttgtcccagatcacgaaagtgaacatgccacgtacgcgctgcagcaaatccacaccccactgctcatagccgtgcagcagcacctcggtgtcgcttttggtggtgaaggtgtgtccggccgcgatcaattcctcacgcagcgtctgatagttgtagatctcgccgttgaaggtgatgaccttcgaaccatcctcgttgtagatgggctgctggccgccgccgaggtcgatgatgctgagccttcgatggccgagcgccgcgtgctcgtcgatgtaatggccttcgctgtccggcccgcgatgcgcgatcatgtcggtcatacgttggaggaccgggcatttcacgtcaatgggcatatcgttgacgaaaccagcaattccgcacattatctgcaatcccttcaaaacgaactcggtgtcagtgtaccagcatccgcatgtcgaaaaaccgccgccgcgcctccgaaccgattcatgcgtgacaatctccacaggtttcagacattttaggtatgccgcatagccatgaaaatgacgattctttcctttcgcccgtcacggctacactaccgggtatggatttccacgatgcccgcacctgcgtgatcttcggcgcaggcgattattacgatgagacccctgcgattccggatgacgccttcgtcgtcgccgcggacggcggcctcgaccacgtccgagcttttggcatcgacgccgatttcgtggtcggcgacttcgattcgattaccggcgaccgccccacgcaaaacgaccgcaccatcgcattgccttcggaaaaggacgatcccgacctgctgtcggctttgaagatcggctggctgcgcggcgcgcgcacgttccacatatacggcgcgctcggcggacgaatcgaccatacgatttccaatatccagcttatggcgctactggccgaccgtggcgcgaccggctacctgcacggcgacggatcgatcgtcaccgcgatctgcgacggcgcgctcgatttcccggcggacgacgccgttgcgggacgcatggtctccgtgttctcccacagcgatatctcgaccggcgtaagcgaaacgggattgaaatacgagctgcaccacgccgacatgagcagcacgcgcgtcaacggactgagcaacgagttccttgccggcaggccgtcccgcatcacggtggagcatggcacgctcatcgtcacgttccccatcgaggctcccctgccgcacgtggcgcgatggcatggcttctccggagatctcggtgcattggacacggacgtatcctccgcgctggtcgagccaagcggccgttgaacgcatgcgggacatgcatgtgagcgttcactgaaaatcgcactgcattttggaacacgcgcctcggaacgttgccctaagtacaggtgacgcactacagtggacggtgttggtaaacaatggcttcagtgtgcctggcacacgcgtggcctaccctaaagggagaattacatgacagttaagattggtattaacggctttggtcgtatcggtcgtctggctttccgccgtatcttcgagctgcaggctcgtggcggccaggccggtgacattgaggtcgctgcaatcaacgatctgaccaccccgtccatgctggcctacctgctgaagtacgacagcacccacggcaccttccgtcatgacgatggcaccccggtcgaggtcacctccaccgacgactccatcgtggtcgacggcaaggaatacaaggtctacgccgagaaggatgccaacaacatcccgtgggtcaagaacgacggcgttgagttcgtgctcgagtgcaccggcttctacacctccgctgagaagtcccaggcccacatcaacgctggcgccaagaaggtcctgatctccgctccggccaaggacgagaccaccccgaccatcgtgttcggcgtgaaccacgagaccctcaaggcttccgacgtgatcgtgtccgccggctcctgcaccaccaactccatggccgccatggtcaagctgctggacgagaactggggcatcaaggctggcttcatgaccaccatccacgcctacaccggcacccagatgatcctcgacggcccgcgcttcccgaaggctcgcaacaaccgcgccgccgccatcaacaccattcctcattccactggcgccgccaaggccatcggcaaggtcgttccgtccgtgaacggcaagctgcagggccacgcccagcgcatccaggttccggatggctccgtcaccgagctgaccaccgtcctgaacaaggaagtcaccgccgatgagatcaacgccgccttcaaggccgccttctccgacaccgacttctacggctacaacgaggatggcatcgtgtcctccgacatcatcggcgacacccacggtggcgtgttcgatccgacccagaccgatgtcaacaccgttgacggcctgaccatggctcgcaccgtctcctggtacgacaacgagtacggcttcacctgcaacatggtgcgtaccctgctgtatttcgccgagatctccgagtgaatcggcgcggagtgatccgcacggttcgtctctgaacctcagacaaaggggctttcgcttcggcggaagccccttttcgtatccgaaacgccgcaacggacacgtggaaggcttattatgggcggcatggcaaagaaaaagcatgagaagggcgccggttccacaccggccaccgtgcagttggaaaaagccggagttccgttcaaaacctacgaatacgcgcattcgaacgatcacatggatgacggttatggggttgaggccgccaccaagctcggtttcgacgagcatcaggtgttcaagacgctgatggcggacaccggctccgaacgcgtggtcggcgtggtgccggtcagcggacatatggatctgaaggcgctggccgcggcagtcggcgcgaagaaggcggcgatggccgatccgaaggtcgccatgcgcgaatccggctacgtggtcggcggcatctccccgcttggccagcgcacacaccacaagacggtgcttgacgaaagcgcgctgcaatacgacgaaatcctgctgtcgggcggcaaacgcggtttctcagtcggcgtcaatcccaacgatctgctcaaggtgctcgacgcggtagcggcgccgatcggcacttggtaaaaaacacgccgatacatcacaccaatacataagtgggcggtcggaacaacacgatgttccgaccacccacttgcgtaagcgaaaggttcgcgctatttgcgcagttccgcaggaagcacgaaatgcatgttctccttgatggtttcgatggtgctcacatcctggtagccaagttcttgcaacgctgcgaccacgccggaaaccagctcgtccggcacggaggcacccgaggaaatacccacggattcgacaccttcaaaccatgcggggtcaagttccgaagcatcatcaacacgatgggcgcgaccagcggcgccaacagccgtttttgaggcgtaccgcgcgttaagtccctcctgagcgacttccatcaaccgcacggaattcgaggaattcgcggagccgacaatcaccacgcaatcggcttgctcggcaacgagcttgaccgccgcctgacgattcgacgtggcatagcagatatcggagttcggcggcattccaagccatgggaaacgagctttgagcgcggtgatcgtgccagcggtctcatcgacgctcaacgtggtctgcgtaagcagcaccagtttcgtgtcaggttggaaatccaacgagtcgacgtcggacgcatgctcgatcaaatgcacatgctccggcgcctcctccaccacgccaacagcctcatcgtggcctttatgcccaatgtagatgatctcgtaaccttccttgacaaaacgcagcacctcgcgatgcactttgcttaccagcgggcaagtggcatcgaccacatgcatgccgcgcgccgcggcctcggctttgaccgccggagacacgccgtgggcggaaaatacgattgggatgccggcttcggcggcggcatcgggaatctcagccaattcctgcacgaacaccgcgccctgcgcggccaaatcctcgacgacatgcttgttgtgcacgatctggcggcgcacatacaccggcggcaatccgtcggcacgtggcgtatcggcggatttgagaatcgtccgcaccgtcagaatcgccctatccacgccggcgcagaatccgcgcggatccgccagcacgatgcgtttgcccatgtcaagccgccttccaatcgtatccatccatcacaacagcaatcaccaatattaaggcacgggcgccgtcaatcgacatcggccgtcttcatccgcagaatttccacacgacaagcgcatccaccaccacatcgtgagcggtaacatagtagcggaaacacagtcgacaacactatggagtgatttatgacctgcaccaatctgccgccacgcaccggacagcaattttccatttcgcatggcgattaccatgccgtcgtcaccgagttgggcgcgacgctgcgcaaactgacctaccaaggcgaggacatcatcgtctcccccggtccggatgacatggtgacctgctgccacggccagctgctcatcccgttcccgaaccgcatcgagaatggcgaatacaccttcgaaggcaagacctacacgctgccgatcgacgagcatgagcgccacaacgccatccacggctacggcaagcgcgcgttctggaagcttgtctcccttaaagaggatgccgtgaccctcagctggcgcgcccccaacatggagggatatccgttcgacatcgtggtgaccgcgacgtacagcctcgccgacgatggcctgcatctgaacatcagcgcctacaacaacggcgatgcagacgcaccgtgggccttggccatccacccgtggctcgccaacggcttcaacggatacggcgatgagatcgacgcccacaacgccaagtgcagcctgaccgtgccggggcgcacgcatgtcaccgtcaacgagaacctcattccgaccggcaccgagccggtggacggcaccaagtacgacctgcgtaaggacacgctgctcaccgagcagccgttcgacgacgcttggacggatctggagcatgccgaagacggcaccgtcaccgcggtgttcacccgtccggacggcaagaaggtgcgtgtgggcggcgacgagaccgtcacctcgttccaggtgtgcaccggcaccggtttcccggccatcaagcatccggccggcgtggcggtggaaccgcagacggcatacgcgaacgcgttcaacaccggcaaggacctcatcgtcatcaagccgggcgagacgtcaagcacggcgctgttcatcgggatgctcgactgatataatcaccatcggaataagtcccggccacacagcggacgccgaatttggcaaacgtctcgctcgtgtgcgataatcccgaaggcttattaatcgcaagtaaaggagtccaatcatgggcatgcgcggacgtaagcgcaaggatcgtcgtaagaaggccgccaatcacggcaagcgcccgaacgcctgatccctgccggcgcgaatagcgtcacagagcatggaaaaccccgcggaatcattacggttcgcggggttttcccatattcagacgctgatgcggcgggcgcgcctcgcgtcacatcagcgtggcacttggcgcatgaaacgccgcacgtccttccaattactcgtcacaacagtggtcaagtgtcgcctcaagcctgtcgatcaggctttgcggcgcgtgtttcggccgcaggtacgcgcgcatcgctgcgatcagcgcacgttcgcgttcatcgcaacaggtctccgggtcgaagcagtccccggaagccacgacatgcacgctggcatgcgtcacctgcgtcaccacaccgttcgtgttggtggtggtcgaagtaatggagatgtgccgttccattggttcgctcatggtcgatccttcccggcagtggcatagccacgttccttggcgtaattggcaagctcacgtttcagctgtgtgcgggcgcggttgagccggctcatcacggtgccgattttcacgccttgttcctcagctacctggctgtatgatttgccgtcgatcgcggcgtcgatgaaaacctgcctgcgttccggggaaagccggttcaaagcggccatgatctcctccggcgcgtaggcgtccaagtattcctgttcggcggatttgagctgttcggaggaatgctcggacgcggaatacaggtcccagtcgtcgtattcgccggtggaatcgttggcgcgttgcggccgtcgcttggctttggcgtactggttgaaataggcgttgcgttcgatggtggtcatccaagccgcgaaattcgttccttctttgaaggagtcgaacgccttgaatccacgttcgaaggtgtcctgcaccagatcctgcgcgtcgtcgggattgttggtcagtttcatcgcctgccggtacagcgagtccacgacgggcatggcaagcttctcaaaccgcgcgcgccggcctgccatggattccgtttcttgttcagtcacaccctcattgtaacttccccgacgtcacacgtcgtgcacatggttgccgctaaaatggctcttcggtatccgctcggcgtctcatacacagggagaacacgaaaacatggctttgactctggaatcggcggcccaactgctcgataggcacggactgctgcgcgaaatcatccgcggcgatgtctggacgcttgatccgcacgacatcaagggattcgacgagccgttctccgcaatcacctacgacacccgcaaggtggagccgggcacgttcctgtgctgcaagggccgtttcaaggccgaatatctgcagggcatcgacgaacgcggccttgccgcctatgtgtcggagaacgacttctccgacgccacgcaagctccgggccttattgtggatgacgtgcgcaaggccatggctttgctatcggctgaattctatggtcgtccgcaggaccagttgaaggtggtcggcatcaccggcaccaaaggcaagaccaccaccgcctatctcacgcaggcgatgctcaatggctgttccggcggcaagtgcgcgctgttttcctccgtggacaattgtcttgacggccacacctacgtggaatccgatctgaccacgccggaatccatggatgcgttccgcatgatgcgcgaggccgttgataacggcatggaatatctcgtcatggaggtctcctcgcaggcctacaaggtggaccgcgtgttcggtctcacattcgacgtggccgcgttcctcaacatcagcccggaccatatcagcccgatcgagcatccgacgttcgaggattatctccactgcaagcgtcagatcgtcaagaactgccgtgccctcgtattgggtgccgattgcgcgcgcgccgacctcatccggcaggacgcacgtcatgccagcgttcccgtcaccacgttcgcgcttggcggcgattccacggcagacgtcatggccgcgccggcgaatgacgatcacagccgcttctccatcgtcatcgacggcacctcgatcggcgagttgagcctgacattggacggcgatttcaactatgcgaacgcggcggcggccgtcgcgatcgcccgtgcggccggtttcgatttcggttccgcacaggccaaggacgcgttgcgtgagatggagccggtacgcatcgccggacgtatggagcatttcaaggacacgcggtcgaacaccatcgccattgttgattacgcgcataactacgcgtccgtcaccgcgttgcttgactacgtcgatcagcgttacggcagcgaaaagccggaaatcacgctcatcaccggctccgctggaaacaaggcatacgatcgccgcgccgaaatcgtccacgccgcgcaggaccgcatcgaccatctcgtgctcactttcgaagacaccgacgacgagcctgtggaacaggtctgcgcggacatgaacggcagcgtcaccaacccgcagcttgacgtgaagaccattctcgaccgtgccgaagccgtggagaccacggtaagccgcgatcgcaaggatcccgagcatctgcacatcatcctcatcatcggcaagggcaacgaacgttggttcaaagaccacggcaagcacatcccttacgagggcgacgaccgcatcgtggaacgtgtgttccgtctcaaataacaactaaggtgaaggcattatgacacgattccaaccgattctgctgggcagcgacatcaacgtctacggcatggccagggcgttccatgaggagtacggcctcgtttccgaggcgtatgcgtatttccagctgagccccacgaaattcagccgtatcgtcaacgtgcacatcgtcgacgatttcaacaacttcgtcacgttccgtaatttcatgctcaagctcggcaagcgtatgaaggccgaggatccggaacgcgtgctgctgctcatcccctgcggcgacgtgtacgccaatctgctgagccagtgcggcgacgatcttcgcgaatatttcgtatacaacacgcttgacgtgaacctttcgcgccggctcgcctacaagtccacgttctaccagatctgcgagcagtatgatctgccccatccgaagacgcgcaccgtcaccgccgatgaggtgaaggcaggaacctaccgtgatttgccgttcagctatccggtggccatgaagcccgcgaattcggtggaatggctcaacatcgatttcgagggccgtcgcaaggcctacatcttcaacgatccggccgaattggagaccatcatcaagcgtgcgtacgatgccggatacacgtccgaaatggtgattcaggacttcatccccggcgacgattcccgcatgcgtgtgctgaacgcctatgtggaccagcatcatcgcgtgcgtatgatgttcctcggccacccgctgctggaggattcctcccctgtcgccgcaggcaactatgcggccattctgcccgactacaacgagggtgtgttccgtcgtatcaaggctttcctcgaggacatcaaatacgagggcgtggccaatttcgacatgaagtacgacgaacgcgacggcgagtacaagctgttcgaaatcaaccttcgccaaggacgttccagctatttcgtcacgctgaacggattcaatctggcgaagtatttcgtcgacgacctcgtcgaggacacgccgttcgacggcaacaccctgttcggccgcggttcgaagctgtggcttgagattccgaagtcgattttccttgattacgtcgcagaaggcgctgacaaggaaaccggcaagcgcatgctcaagtcgggcgattggggtaccaccttggagtattccaaggatatgaatccgctgcgttggctgatgattcggcacatgttctcgatttacaagaagagctatgccaagtacttcaccaagaagggcgagcttaagtgaaacgaccgtttttcgccgtactgggcggcatgggcacgctggccaccgaaagctacatccgcttggtcaaccgcgccacgcatgcccattgcgatcaggattatctggactacatcgtcttcaacgattcctccgtgccggaccgcaccgcgtacattctcggcgaatccgacgagaatcccttccccgtactcgccgacgatatcgagaaggcaacggcgatgggcgcgagtttcattgtgctcacctgcaataccgcgcactatttctatgacgatttccaggcgttgacgacggtgccgattctgcatatgccacgcggcgcggtggcacgcatggctcagcgttatccgaaggatcgttttccgcgggtcggtttcctcggcaccgtgggttcgcgcaaatccggcgtgtacaagcgtgccgtcgaagaggccgggtacacgttcgtcgaaccgaccgacgagttgcaggcccgtatcacttcgctgatttatgacgatgtgaaaggtagtggcgagctcaatctggaacgctacgaatcggtgttgcgcgatatgctcgatccggcaggcccctgcgcgtgcgacacgctgatattgggctgcaccgagctgagcgtgctcaacgaggcgtttccgctgccccagctgccggtcatcgacgcgcaggccgtgctggtggaagataccgtggcgcgggccgaagcgttgcgcgcgtagctattatttgtcacgcctatcttcgactgcttaggcgtcggacgataaaacaagattgtgggtggcttcccattgcctggggagccacccacaatctgttttatatggacggtgtacgccgcacgtatggcgtcatcgtccgatgttgtttcgcttcgtcacttcgtttcgttttccgaagacgtttccgcatccgccggttcgttggcatccgccgcctcatccatttcatccgcatcggcgtctgctaaaacggaatcgtccggaccgacgctgccgaaatcgttgatgttgaaatcggggttggcgtcggattcgaaatccacgtcagcctcgtcctgctttttgcgcggttccggatcgacggcttcctggaacacacgttcggcctttggcttcttcaggtcggggttgatcttctcctccagcatgagtcgcgcatcaccggcggttgtgaagctgccacagacgagcacgccatgaccgtagccgacgcccagttcgtcatcggcatcaaccatgttgacggcttcctggatggcgtccggcaattcgggaatgcaggtgacgcgttccggcccgaaaacacggtccgcgatcttcttcagatcctcagccggcatcactcggtcacgccacgagttctcggtgacgatcacatggctcagcaacggttcgagcacgcccagatactcctcgacctgcttgtcccccatcatggcgaccacgccgacgagctgctggaaatcatagttctcttcaatggcggcacgcagcgattcggccgcgttcacgttgtgtccgccatcaaggatgatggtaggcgaggtacgaatttgttcgatacgtcccggaatgcgtacgctgctcaacgcttcggccaccaaatcgccgtccaacgcgccgttgacgggaatcaccacttccgccgcgcacagtgcggcgagcgcgttgtgtgcctgatgctcgccgaatttggcgatcggcacttccgtgtaggtgccgttcggggtgcgcagggtggccacctggccgccgacggccggcactcgggtaacgacttccgattcgacgccgtcgcgcaccaagctggcgtggttctccttggccgcggcctcgataatcggcatgacctcgtcctcgtgtggctggcggccgatgatggcggtgcagttcggcttgatgatgccgaccttttccgtggtgatttcctccacggtgtcgccgagccatgccatgtggtccatgtcgaccggtccgatgatggccgcgtccgcgtcgagcacgttggtggcgtcccatcggccgcccatgccgacttccacgatggcgacgtcgaccggcgcgtcggcgaatttccagatggccatggcggtgagcacttcgaagaagctcatcttcggcttgcccagctcgtccattttcatgtccacgatggcgacgaggtccttgacctggtcccatgtgtcgacgaaatcgtcgtctgacagctgctggccgtcgatggcgatgcgttcgttgacgtgttccagatggggcgaggtgtataggcccgtacgcatgccgtaggcgcggcagatggcttcggccatacgtgccgtggagcccttgccgttggtgccggtgatgtggatgacgcggaacgactgctccggatggcccatgatgtcgaggatcatcttcatgcgttgcaggtcgagattggtggtgttgcgttccgatggacggctcatgatgtcgcgttcgacgtcgatcatgctttcgttgttgcgattgggatgttcgaatgacatatttcccgttttcctcccgtaccttgcggacagcacactaaacttttcccattctagatgtccgcatgaacgttgcgcgccgggaaaagttataggataggttgcggtaatttccgtacgttacgaatgcatgttcaggagatgtgatgggcgaagtcattactgacaaggacaaggaatacgagaagatggagcgggagtccgctccgggaccggatcaggccatgagcgatcgtgtgaacaatcgttcgctgcgtccgcgttccgaggcgttcaaggagttcatgaccaccggttgggatgacaacgagccgcagatcgagccgttggagtcctccaagtacacgccggcgcgtctggaggcattgggcaaggcgttcccgggcgagcgtatcgtgattccggccggacagccgaaggtgcgcaacaacgattgcgattacgcgttccgtccggatacgacgttttcctactacaccggtttgggtgaggatttcgaggccggcgcggtgctggtgctgaatcccgtcgatccggattctccggaggcgaaggccggcaagacgcatgttccggaactgttcgtggctccgcgtgccaaccattacacgcaggactttttcatgaacgcccattatggcgagtattgggtgggtccgcgtgccggtgtgaaggaaatgaccgcgatgaccggcatcgaaaccaacgacatcgcgcagctgcccgacgcgttgagcaaggatgtcggcactgaggccggcgcggtgcgcgtgcgcgtgatccgcgaagccgatccggcgattaccagcatggtcgaggagatccgtgaagccaacggtttcgccgatccggacaacaacaccgctgccgatgacaagctgcacgaattcgccgccgaggcacgcatgtgcaaggatgagtatgaggttcgtgagatgcgcaaggcggtcgcggcaaccaagcatggtttcgacaacattctgcgcaagattccgtcttcccttggcaagccgcgttcggagcgcatgctggagggcgcgttcaacgccgtctcccgtgaagaaggcaacgaggtcggctacgacaccatcatcgcttccggcgcccacgctccgattctgcattggatgcgcaataccggtaccgtggagtcgggcgagctgctgctcatcgacgccggtgtggaggtcaacagcctgtataccgccgacatcacccgcacgttcccgaccaacggcaagttcaccgatttccagaagaagctgtaccaggccgtgttggattcccagcaggccggtttcgaggcggccaagccgggcgccacgtattcggacatccatcatgcgtgcatgcgcgtgatcgccgaacgtctgcatgactggggtattctgccggtcgatgtcgaggagtcgctctctcctgaaggccagcagcatcgccgttggctcgcctgcggcgtggcccaccatctgggtctcgacgtgcatgattgcgcgcaggcgcgttatgagtcgtatcagaacgccaagattcgtccgggcatgatcttcaccatcgaaccgggcctgtacttccgtgaggatgatctgctgattccgccggaataccgtggcatcggcattcgtatcgaggatgacgtgctcatgaccgaggatggtccggaatggatttccgcgggcattccgaagcagatcgacgatgtcgaggcatggatggccgatatggccgccgaaggcgcgaaggcctgaggacgcatcatgcccacgcctgaattcgtactctcgctacgtgaaaaaataggccacgatctgttatggctcatgggcgtctccggctatgtcgaggacgagcagggccgtgtgctgttggggcgtcgttccgacaccggcgaatgggccatggtgtatggcatcaacgagcccggagaggaaccggccgataccgttgcccgcgaggtcaaggaggagaccggcgtggatgtggtcgtcaccgatctggtgtcggtcaaatcgtccagaaaggtcctcacctatgcgaatggggacaacaccatgtacatggatcacctgttcatctgcaggcccgatccgaatggcaacacggagccgttcgtcggcgatgaggaaagcctcagcgtaggctggttctcccctgatgctctgcccgaaccgttggcagccaccacggtggaacgcatggcttacgtacgcgaatatctgaaggccaaggcgaatggcgattcccatgcccagtttgccttcaacggcaccatccgctgaaatcgccttccatacatcataaaatggaatccccgcaacgtttcaagcgttgcggggattccattttattagattccgtggatcagctcactgctgggcggcaagcagctcatgcagatgctcgcgatgcttgcgctgttcgcgcggatcgggcaccggcagggaggccagcagcttctgcgtgtacgggttctgcggattctgcatgatctggtccgcatcgccatgttccacgatctggcccttgtgcatcaccatgatgcggtcggcgagcatgtcgaccacggcgaggtcgtgcgtgatgaacaggcatgcgaagccgatttcggcctgcagcttcttgaacagttccagcaccttcgcctgcaccgacacatccaacgcggaggtcggttcgtcggcgatgagcaggctcggcttcagcgccaacgcgcgtgccaaggaggcgcgctggcgctggccgccggacagctcgtgcgggaaacggttcatgtaggcgcgcggaagctgcaccatctcaagcagatcgcccacatacttgcgggcgtctgataccgacgaaaacttcttgtgcacgatcaacggttcggccacgttttccgcgatggtcatcagcggattgaacgagctgcccggatcctggaacacgaagccgatgtcggcgcgtttgggtttgaagtcgcgttccttcacaccgttcatttctatgcctagaacgttcagggaaccgccggaaaccttctgcaggcctgcgatggcacggccagtggtggatttgccggaaccggactcgcctaccagaccgagcacttcggaacggtggatggtgaagtcgatgccgtccacggccttgaaatcaggctgcatgagatgacccggatacgtgatggtcagtcccttggcctcgaccgcgatgggctgatcgcgccaatccttctcacgttcgatgaccttgccatcggcatccttgacgaccagtttctggccaatacgcggcacggcggcaagcagacgcttggtgtagtcgtccttcggcgaatagaagatctgctcgacgctgccctgttcgacgacgtggccgcggtacatgaccacgacctcatcggcgatgtcggcgatcacgcccatgttgtgggtgatgatgagcacggatgcgtcgaactcgtcgcgcgccagacgcagcaggtcgaggatttcggcctgcacggtcacgtcgagggcggtggtcggctcgtcggccagaatcaggccggggttgagcaccagggccatggcgatgacgatgcgctgcttctggccgccggagaactggtgtgggtagtagtcgatgcgggtttccgcgtccggaatgccgaccttcttgagaatgtcgatggacttggcacggagttccttcttgtccttcatgccatgggcgcgaaggccttcctcgatctgccatccgatggtgtacaccgggttgagcaccgaattgggctcctggaacaccatggccgcttcggcgccgcgcatttcgcgcagctgttcgccggacagcgacagcacttccagctcttcggtgcccgcgcggttcgacaggtacaccgcgccggaggtcgtagcggtctccggcagcagcttgatgagggagcgtgcagtcacggacttgccggagccggactcgcccaccacgccgatgaccttcttacggggaatttcgaagctgatcttgtcgatggctttgatggaaccggcgtcggtcatgaacgagacgctcaggtccttgatctcggcgagattgccttccttgatttcactcatcggttcactccccttcctcggaagcccattcggaagccacgaatgacggatcacggtcggtgacggtcaccggtttgtcgctggctcccatcggattcttcgccgcctcaagttcggcgacgacctcgttgcgcttgcctggctcctggctggggtccacggacgtgtcttcgatggagccgaccacttcgcctgcggacttgcgggcgcgcagacgcggatcggccagatcgttcagcgattcgcccaccagggtgatgcccagcacgatgagcacgatggccagacccgggaacacggcggtccaccagatgccggcggtcacatcggagacggcgcggttgaggtcgtatccccattcggcggccgcggtcggttcgatgccgaagcccaggaagcccaggcccgcaagggtcaggatggcttcggaggagttcagcgtcaggatgaccggcagggttcgtgtggagttcttgaacaggtgcttggtcatgatgcgccacgtggaggcgccgaccacgcgggcggattccacgtacgcggattccttgatgcggatcacttcggcacggatggtacggaagtattgcggaatatagaccacggtgatggagatgccggaggcgaagatgccgctccacaggccggactggccgtgggagatcatgatcgccatcagaatcgccagcagcagcgacgggaaggagtacacggcgtcggcgatcatgacgagcacacgatcgacccatccgccgaaatagccggagaccaggccgagcagcacgcctgcgaaaatcgacagcaataccgcgacgacgatggcgatgacggcggtgcgggcaccccagaccacacggctgaacacatcgtagccacctgcagtggtgccccagatgtgttcggaggacggtgccgcttgggccgggaaggaaacgccgtcggcgcccttgagctgcgcgtagctgtatggcgcgatgagcggcgcgaaaatggcgaccagcaggaagaacgccgtgagcacgaggcccgtgatcagcatgcctttctgccagccgactgcgacgcgcagttccttgatgatcggaatcttatgccagaatggcgtcttgttgccgagcttgagctcgtccagacgattgtcgcctggaacggtgaccttgttggcagatgctgcggtcatgtcagtacctcactctcgggtcgaccaacgcggcgatgacgtcgacgatgaagttgacgacggccacgatgatggcgattaggataacgatgccctgcacggccacgaagtcgcgtgccttcaggtactgcgacagcatgaagccgaggcccttccattcgaaggtggtttcggtgagcaccgcgcctgcgagcatcagggcgatctgcatgcccatgacggtgatgattggaatcaacgccggcttccatgcgtgcttgttgagcaggcgtttctcggagacgccgcgggaacgtgccgcttcgacgtagccggaattgtaggtggcgatcacgttggtgcgcaccagacgaatgaatacgccggcggtcaacaggcccaacgcaagggccggcagcacggcatggcgcagcacgtccagcagtacggacatgtcgcccagctgaatcgcgtcgatgatgtagaagccggtcggcgacaccagtcgggagaactgcatctcgctgccaagcgatgagcgcccggatgccggcagcacgttcagccagatggcgaagatgagcttcagaatcaggccgaggaagaacaccggggtggcatagcacaggatggcgaaggtgcggatgcccgcatcggccgcgtggtcacgcttgcgtgcggcgatgcgtcccaagccgatgccgacgatgagcgcgacgatgagcgcgaggaacgccagctcgaatgtagcggcaccatagtgagtaaggatggtactcactttttggttatcggtcaatgtggtgccgagatcgccatgcagcaggccgccaagataatcgatgtactgcacgatgagcggacggtcataaccggccgcgtggatacgcttctgcagttcctcgggagtgagacggccaccaagagcggcggaaatcggatcgccggtagcgcgcatcacgaagaagacgatggttacaagaataaatactgtaggaatgatcagcagaaagcgtgtgagcacgaaacggaagaatccgcttgaaagcttgtttttcttggctttcggctgagcctcggttgcgctttgcgtcacgtcgggctccttttccttattggtgttttagatacaaattgagcccctgcctgacttaggcgggtcaggcaggggcggtcaaagccttccgtcaggccttggtcacggacgagtagcggaagcggaaggaagcgtcaaggacgacacccttcacattagaaccggtgaccgcaacctgggcaccctgcagcagcgggatggtggacaggtcatcggtttcgagcttctggatttccttcaacaggtcctcacgggccttggcgtcagtctctccggcctgcttgacgatcagatcgttgacttccttgttggagtatccgttgttcacgaagttgccgtcacggaagaatggggacaggtagttgtccggatcggagtagtcagggaaccaaccgagctggtagaccgggtaggaaccatcggaatcctcggtgaccacacggtccttgttgaactgggtccattcggtggactgcaggtcgaccttgaacaggccgccttcctcgagctgggccttgatggccgcatactcgtcggcggaggactggccgtagtggtccgggttgtactggagcttcaggtctaccggggtcttcacaccggcggcttcgagggtcttcttggccttggccgcatccggcttgccggaaccgtcgccataggctgccttcagggtgtcgtcgtggccggacaggccatccggaatgaaggagtacagcggggtgtaggtgctcttgtagaccttggtggccagctcgttgcggtcgatcaggcttgcgacggcctgacgcacggccttggccttgtcggcgttcggctcgctggacttctcgccgtacggcatgatcttgaagttgaaggcgaggaagcgctcttcgccgcccggtcccttgacgaccttgaccttgttgtccttggacaggtcctcgacgtcggtcggggtcatggagcggtaggccacgtcgacctggccctgctgcacggccatcttcaggttggaggagtcggcgaagtacttgacctgcacaacgtcgttcttagctggggtcagacccttgtaggaatcgttcttggcatatgccagggcctcgttcaccttgtaggaggtgagcttgtacgggcctgcgaaggcgttgtccttgacgatggtgttggcatcggtcagcttgtcggcggagaaggactcttcgtcgacgatcgggccggccgggctggagagcacctgcttcagggtcacgtcgtccttgaccgcggagtggaacacgacggtggtgtcatccttggtctcgacggactcgatgttggccagcagggaggacggaccgttctcgtcgttgatcttcttgatacggtcgaaggagaacttgacgtcggaggcggtcagatcgtggccgttcgcgaacttcaggcccttcttgagcttgacggtgaactcggtgccgtcggcgctccaggtgccgtcatcggcggcgatgtccggagacagctcggaagtgttgtagttctgcgcgtacaggaacgggaacacctgaatctgcacggcgtaggaaccgttgtcgtaggagccagccggatcaaggctggtgatcttatcggtcgtgccgacggtgatggtgttgccggttgcggcgccaccgtccttcacgccgccgcaggcggccagggaagccagagccgcgacagaagccagagcggcgataactttcttgcgattcactatggaatcctctcttttctatccgaatcgcccctgtgcaaggcgatatagtgacaagaatcggcgcgcaatgttaaccgtacgtttcattggaggccgttttacccacctaccttatattcgtcgttttctgctatgcattaaaacggcgaaattccaacgttttaacgactactgaaagaaaataagaaaaaccagccattttatgagacggacccagccaaagtcgcattcaaggtctacgtccttcttttttactcattgctttcgcacagagagacccagataagcgcgcgacacgcggcacaacacgaattgcattaatcaattaacggcgttaatatattaagaagttcaatgagggtccatgcactgtcgcaaggaggtgagcatgagtaggtacagcgcccaacagttatcgatctcggaaaacaaccgttcccgtatcctgcaatacctgtaccacaatggcatctgctcacgcgcgcagatcgccaaagccatcaagctcactccggcggcaatcaccaaaatcaccgcgaaactgctggcgcagggcatcatcgaagaaactggcgacatggacggagacaagaaccgccgttccatcggtctgaatctcaattgcgccaaataccacatcatcggcgtgaagttcgcccgcagtctggtgcaaatcgcggtcttcgacctcaagtgcaaccgtatcttcctgtccgacttgcctaccgtcagcgaagagcacatccccgaaacggtggagcgcattcgagataccgtacgccagctcatcaaggacgaccccagcatcgtggccgtcggcatggcggttccggggccctatttaaaggacgaaggacgcaccgctttggtctcctccatgcagggctggaggcaaatcaacttcatcgacgaattcagcaacgcattcagcgtccccgtgttcgtcgaacaggacgcccgcgccggcgcgctggcgcagttcctgctcaatccggaactgtcggaaggttccctcgcctactatctgcttggcgaaggcatcggcctcggagtcatcgacaacggcaccatctactacggcgagcacggcaccgccacggaaatcggacacgtctccatcgacgtgaacggcaagccatgcgactgcggcaatgtcggatgcctggaacgctactgctccgccaacgccatccacgaacggctcaacgccaatccgagcatcattcccggatgcgagacgatgacacatgcgcaggcttgcgcagcactgttcgccaaggcgaacgcgggaaacgagaccgcgacgcttctgatgctcgatgttgcccgatacgttgggtacggcgcggtcaccatcatcaacgctttcaatccgacacacatcgttcttggagacatcatcgcgcaagccggccagccgttgctcgacgaagtcacacaagtcgtgcgcgaacgcacgatccccgaaatcgggcgcaacacccgaatcaccctgtccgccctgcccaccgacgccaccgttaccggtgccgccgccgtggcgataaccaattttctggaacatccttcgatgttcttcgacgtcgcatagcacgccgcccaccaaagaaaggaaccacccatgtccaagccaatcgtcatcgccctcggtgaaatcctgtgggatatgctccccaccggcaagcgcgccggcggcgctcccgtcaacttcgcctaccacgcgtcccagaacggcgcggaaagctacgccatcagcgccgtcggtaacgacgagctgggcgccgagctgctcaacgatgcgcacaaggccggcatcaacacgctggtgcagaccaacgaatacccgaccggcaccgtcgccgtggcactgaccaacggcattccggaatacaccatcgtgcagaacgtggcttgggaccacatcggctacaccgacgaactcgccgaggccgtgtccaaggccgacgccatctgcttcggcacgctgggtctgcgttcccaggaatcgcatgacaccatcatcaaactgctccagcatgccaaggaaggcgcgctgaagttcttcgacatcaacctgcgcgccaacttctactccaaggagctgatcgaggagctgctgggatacgccaacatcttcaagatcaacgacgacgagctcatcatgatgcgtgagatgttctccattccggagggcaacgacgaagaggcctgcaagtggttcatggatcgcttcgatctggagtacaccatcctgaccggcggcgcgaccttcagcaccatcatcgccaaggacggcgagacctccactctgctgaccccgcatgtcgaggtggccgacaccgtcggagccggcgattccttctccggctccttcaccggcaagatcctgtccggtgcctccctcaaggaagcgcatcgcgcggccgtgaacaccgccgcctacgtgtgcaccaaggaaggcggctggccggcctacccgaccgaaggcgttccggattacctcgccgcagcagccaagtaagcgtatcttctcctttcatcatcaccgattccgcatgccgtcaaataacggcatgcggaatttttttaccggttttgcgaagtttcgtcggtatgatgaatcgccgatagcataatttggtttgtcggataaaccgtggtatcttgaaatgtctggctataaagccggaaggtttgataattcaatatttggggatgatcggtttcgacggtgacctgttcgtcgcagggaagcgtgccgagaacgtagggtccgctcgtggatgccccctacaaaagaataagtgctaaatctaaccgcactgagttcgctctcgctgcctgagcttcgcgccagggttaaccagtgagcagccgctccgttcactccccctcgtctttggggggatgttgagcgtcgtttagaagacttgccttaccggctgagccacagggccggcaagggacttttactgtagatatgctcgccatcagttgtctgcgacatcgatgggggcagaaaaaccgccgcacggccagcagactacgcacgtagaagactgagggttcggtcatcggaccggggttcgattccccgcatctccactgatgaaaagccgccagaaatggcggcttttcctttatttccaacggtttccaccacttttgcaattcactgcaattcgccccttatcgcgataattctcaaaaacatgggcaaaatgtgggcacgaatcatgcgtcagcaatgacggctttttgtatttgcaatcacatttctcgtttggtgaaacaacgcatgtcggcagcaacgcctccgtatcatcgaaataaccgtccggcgcctttcaatattgcaagccgccggccagccaaccatcgaaagggacgatatcatggcgaagcttacagaggaaatgaaggatttcatcagcagcaatctcgcttgggtggccaccatcggcaaggatggacacgtcgatttggggccgaaaatgagcacgttcgtcatcgatgacactcatatcggctatcacgagcgtaccgccggtcaaatgtaccgtaatctgctcgacggcagcgaactggtcatcgcagtggccaatcttgagcagaagcgaggttatcgtttccgtggcaacgtcactctgcattccgatgatgcgatctacgatgagcaggtcgccgtggccgaacataacggcacgaagaagcccatgaccattcccgttctggagatcacggagattcaggacttgacgccgggggcgaccgcaggcaagaccatcgtcaaggactaacgcccgttcaacgcatacggctaataccatccatccaaacgcggaaacgcgctctggccctcccttggaaagaaggtccagagcgcgtttcgtttttctgtcaagacaaaaagagctagatcaaagtatttccgctccgtcatgcagtgacgttgcgcaataacgctatttgatgatcggtctcaacggcgcggacacgtccacgttatgcttgtctccaatcacgttcggatcattgacgatcttgtccaccaccgctttcttgagcttcaggtccgaggaatcaccccatacgatcacgcggtctcccccattgagttccgtggtgatggaatcctgggtcgccgcggtgaccttggtgatggagttgcgcatcgattccggcagtgagctgagaatcttcaacgcttccttgataggacgcctagacaggctcgtatcgacgttctgcacttcgatgacgggaatgccttccacggaaacgccgctgacggaattgagcacgcggcccttgctgtcgaccgccgtcatatggtcctcgctggttttgagcatggccgcgggtttctgcgccttgatcgtcacttcaagcgagttcggcagctgtttcttcgacttggctgacgtgactcccggaatcgccttgatctgcttctccacggctccatccgaaaccaggaacaacgattttccggactgctgcctcgcgatgtcaagcacctgcgattcgctcacccattcgttggcgccgaccacgctgatgttgcctggctccaaacggaacaccgacgagaagaggaacagccagacgacagctcccaaaaccacggctacggcaagaccgatgagcacgcgcaggactatggctcgcgcgccggcctgacggcgttccttgagccgttcgccgaaatcaaccactttcggacgtgtcatgatgccgatcgtgccggtggtctcctgcagggttttggaaaccaggtcctcgctttgcaaacgtcgcgcgtctacgaagccttcggcttttgaacggtccgcgtacccttcaatcgaccgtccttcggcatgctccgatgagatggaccgtccggagcgtcgtccgcccgactggtccgtctcctgcacatccttgccggaactgatgacccgtcgagccatcagccctcgcaatcccaacgatgcgcttcaagagcatgcaggatgacctcgtccatctgcgtgatgtcgccggcgcctacggtgaagatgacgtcgccatgatgcgcgcgcatcaccatcatctgggccgcggtgtgcatgtcttcgacgccacggatccagtccttggccggttcatgctcaagcttgagcgcctcgttcacgatggtggccggagtcacgtcggggaaatcctcctgcttctcgcgcgcggggaagatgccggtaacgatgacgtcatcggccttggcaagcgcctgcgcgaattcagagctgaagaaacgcgtgcgggagaacaggtgcggctggaagatcacacggatcttggactgcgggtagcggcgacgggccgcatccagcagcgcagcgatttcggtcggatgatgcgcgtaatcatcgacgaccgtcacttggctgacggtgccacggacctggaagcggcgtgcggcaccgaggaacgaggtgaccgccgcggaggcacgttcgacgtccatgcccaacagcgcggccgcgataatcgccgcggaggcgttgcgtgcgttgtggatgccgggaacggtaagcgtcactgcgatgcggcgctcctcttcgccgatcagtccgcccggaatatgcagcgtgaaatgttcggctccgctttcggcggtttcgctttccgattcgatgcgtaccagcgtggcaccgttcaggtcgcccaattcggcggcgttccgtgttgaatagacgatcgtgcgtccggccacggtggcgtcaagcgcacgtagcacggcaaggttgccttcgtcgtcgccgcacatgattacggctttggtggcgtgtccggcatggtccacgaatgcggcccgatagttgtcctgcgtgccgtagtggtcaaggtggtcggcttcggaattggtgatgatggcgatttgcggatggtatttggcgaagctgccgtccgattcgtcggcctcggccaccagcacgttgcccttgccggcatggccgccgtccaaaatggcaccgtctttgccttggatggaaccgccgatggcgtagctcggatcggcgagctcgccttctccggcgttcacgagaatgtgcgccagcatggagctggtcgtggtcttgccgtgggcgccggccacggtcaccgcacgtttcgcgttcatcagcagggcgaggatgtcgctgcggtgcacgatgcgctcccctgcctcatgcgcggcgacgatttccggattgtccggcttgatggcgctggagaacacgacggtgttcttgccttcgacgttcttcgcctgctggccgaattcgacggtgatgccgaggctttgcagacggtcggttttggcgcttggctcacggtccgaaccatcgacctcgacaccctgctcatgcagcatttcagcgagcacgctcatgcccgcgccaccgatgccgatgaaatgcgtggcacctaggtcatgcaccgtctcttcaggtgcgaacgacgcatgggttgggtcaagaattatggtaccggcttcacgctggttgtcagacacgattgctcctcgtaaattgttttcaagctcatttcattatggccgcacccatggtctcccacggggtgcggccatgattgttcggccggttaatcagctggctgatcgattagcgcgagcacgcgcttcgccatgacttcggcggcgtcgcggatgccgtatttccacgcgttggcaccgtatcgggacagcttgtccggatcggcgagcagttccggcacatggccacggacccaatccggggtgaaatcgccatccgccaccatcaagcccccttccgcgtcgaccacgggctgcgcgttgaagcgctgctcgccattgccgatcggcagaggcacgtaaatcgccggcagtcccaaagccgtcagctcgctgaccgtgccggctccggaacggcagatgatcagatcggcgcaggcgaacgccagatcgatgcgttccagatagggagccacacggtagtcgccatccgaaacgtggtcggggccaagctcgccgagcacatcctctccggcgcttaccgacaccaaggaacgcacttcgtcgtctttgcccttaccggtcagatgaatcacctgggcgtgcgcaagcagattcttggcggaagcggccacagccctgttcacgttcaccgcacccaaggatccaccggtgacgaccacgagcggacggtccggatcgacgccaagctgcgccgcggcggctttacgagtggcggtacggtcatgttccagatcagacgccaatcgtgcgattgccggacgaagcggcaggcccacgcgttcgacttcgacgcccctgcgtggtttcagtcctggctgggcgtatgcggcaccgatcatggacgcccaacgcgcgcccagcttgttggccatgcccgcgcgtgcgttctgttcgtgaatcgcaatcggaattcccatgctgtgcgcggccgcgtatacgggtgcggacgtgtatccgccgaaaccgacgaccacttgggcctgatgccgggtgaggatgtcacgtactttggccttctcggccttccatttggctggaaactgcaacgcagccttgttgggcctgcgcgggaacggcactttttcgatggtttccagttcgaaaccggcctgcggaaccaaatcacgctccagaccgacggcggtgcccaccaccgcgatatccgcttccggttcaagctcgcgaatcacatgcgccacggcgagcagaggattgacgtggcctgccgtgccgccaccggcaagaacgatatgcttctgattgctcataatccacgagcttagcccaccatgcggcggcaggccacgcggcataccgccgccgatgcagatacttacatttcgtctacttttcttttgcttgcttcgcaactcgcatgacgggaaccgattacagtatgcggttctcggctttgacctgcggctgctccttcatcaggctgatggccacgccggcggcccccagacacatgataagagacgatccgcctgctgatacgaacggcatcggcacgcccatgaccggcagcaggctgacgacgacgccgatgttgacaaacgcctggccgacgatccataccgcgatgcacaccaacgccatggtgatgtaccggtcgcggacctgcacggccaccatcagcatgcaccacgtcatgacgatgaacagcagaatcaccatggctgctccgacgaatccggtttcctcgccgatgatggcgaagatgaaatcgttgtgcgcttcgggaagatagccccatttctcgccggaattgccgatgccgacgcccaacaagccgccggatgcgatcgcatatttgccgtggaccgcctgatagcacacgccctgcaggtcggacggagagcaggtccggtaggccgccatgatgcggccgagtcggttggggctggtcagaatgaatccgacgataccgcatatgccaagcagcgcggctccggcaagccatttgccggggaatccgccaagcagcaatgcaatgccgccaattgcgagaataatcaaacccgtaccaagatccttgccggacatgaccaggcagaacgcgcacagatagccgagaataagcttggagtacgcgcggggcgcgccgaccttcttcacctgcttgcgcgcgttgatcagctcgttcggcatccagatgcataacgccagcttgacgatttccgcgggctgcatggtgaacacgcccggaatgccgatccatcctttgttgccgttgacttcgacgcccaatggcgtcagtgtggcggcctgcatgaccatggcgccaagcaggaaccagaagctgatctttcggtagaagctggccggcagcatcatcgtgatgaatgctatgaccaggccgaacacgcagtacatgccctgtttcagcgcctgcgcccatggcgactgcccgttggcgatcatgttcaccgaagagctggagaacaccatgatcacgccgaagatcgtgaggatgatcacgcataggcggaatccgtggaagcaccataacgggttggcgagattacgcgttccgccgttcttcaacggttctcgtgtctgtgccgcggcgccgtccgtcatgttcgggcggcttgcggaagacgtgatgctacggccggcctcaggcttccccatgctcattcacccaacgctgagcctgctgcgcgaactggtttccgcgatcggcgtacgacttgaactggtccatggacgcgcaggccggagccatgagcaccacatcgccggattgcgcgtaggtgccggcagcgtcgatggcgcgggccatgacggtgtcgttgtccgtgggatcgatgatggacatgggaatgtcgggagcgcttgccttgaacgcgtccagcattggctgctggtccttgccgatgatgatggccgccttgatggtgtgcgcctggtcggcaacgagctgttcgaaacggcctcctttggcaagtccgccggcgatccacaccacggacttgtccgcgaagctgttaagcgacgccttggccgcatgcgcgttggtggctttggagtcatccacgaaacggatggtgccaccgtcggacgttttggcgacggcgacggtctggatgcggtggccgcccggcgtgaactgcttgagcgcggccaacgccttgtctttgtctgctccgagacccaacaccagcgccaacgcggtcagggcgtcggcgagcagatgcgggtagaccgtgccatccggctcggtcagatgcgtgaaatcggtgaccttcgccacttggaacgactttcccgcttctccgccggcaatgccggacatgtcgacgatccagccatctttcacaccgatctgcccgtccttcggctcggccaacgtgaagccgatcctgcggcattccggcgcggtctgggccgcgaacgccaatttggtgacgcgttcgtcgtcggcgttgtagaccagcgccttcttgacgttgtggaacaccttcgccttgtcggcggcatagttctcgatgccgccatgccaatcgagatggtcgtcggcgatgttggtgatcgccgcgcagtcaagttccagagaataggtgaaatgcagctggaacgagctcagttcgacgcagagcacgtcgttcgcggggtcgacggcggcgtgcgacacggctttgccgatgttgccaacggcgggagcggccaggccgcatgcggtcagcatttcggaggtcatttccgtggtcgaggtcttgccgttggtgccggtgatgccgatccactgcgccggcttgccggtggtgttgctgttcacgcgcagctgccaggccagttcgacttcgctcatgaccggtatgttgcgtttctgcgcctcaaggatgaatggcgtgcgcgggttgaagaccggcgaggtcatcaccatgtcggtattgtcccaatcgatttggtcgaaggaatgcaggtcggcgtccggcttcttctcatccacgcccagcactctgccggcacgggagcccagcacttccatcatgctttgcccggagacaccgagaccagccacgattacggtcttgccatccatattcatatccatcacccttcaatcagaaacgtcatttgccgtgatagcacactcatattgcgggcgtaaagccgcgcccgcaatcgtgtcacaagccggaacgggccacccaatcgccgtagaacagcaccaaggcgatcagcacgaacagcatctcgatcatccagaaccggaccacgaccttcacttccggccagcccttcaattcgaaatgatgatggatcggagccatcttgaaaacgcgcttgtgggtcatcttgaagtagccgacctggatgatgtcgctcatggtctcgatgacgaacagaccgccaaggatgatcgccaggaattcggtgtgcgtggcaatggacatggctgcgaacagaccaccaagcgccaaggagccggtgtctcccatgaagatggaggccggattggagttgtaccacaggaagccgaagcaggctacggccgcgcacgccgcgatgatggtcaggtcaagaggatcggacaccgcataggtgaagcctggatggtccgaacccttgaggtggtagaactcccagaacgcgatgatcgcatagccgatgaaggcgatcatcgaggagccggcggccaagccgtcaagaccgtcggtcagattgatggcgttggtccatgcggtcatcaggaaattcacccagatcacgaacagcacgatggccacgacacgaccggcgaattcaaagctgaagaacggcttttcgatgaagctcatgccggcctgggcgctggggaagccggatttggtcggcagaatcagcgccagcaccgcgtatatggtggcgaggatgaactgtccgatgaacttgcccttgacggtcagtccctcgctctgcttcttgcggaccttcgcgaaatcgtcgatgaatcccaggaatcccatcgacagcatggcgaacagcaccaacaccgcggaccacgacggcacctctcccctggtgaggaaccgatacagtgccgaggagcaccagccgagcaccaccgcgaggttgatgaccacgccgccaagcgtcggcgtgccgcgcttgacgagatgcgacttcgggccatcctgacggatgtactgtccgtaattgagcttgtgcaccaacttaatcagcagcggagtgcccacaatcgtcacgacgagcgacaccataatgccgatgatgagtgaaatcacctgatcttctccgtttcagtcagctatgatcggcacgacgccgattccgtcagttttgcgtccaacgctccgccagagcgctcaatccggacgcgtgggatcctttcagcaacaccactgtaccctcatggtcggtcgcaagccgggtgaccattcggtcggcctgttcggcatcatgcgcccattgcaccatcgtcgggtcggcggcaaccgccttgccgccctgcgccatggcctcggcaagcgcgtccaacgcctcgtcggaagtgctgccgaccgtcacaagcgcgtccgcaccgccctcgacggcgtatctgccgacgtcctcatgcaggcgatgctcatccggtccgagctccaacatggctccgagaaccgctattctgaacggctgctgctcggcgccggcatgccagcgcgacagaccatcgagtccggccttcatggaatcggggttggcgttgaacgaatcgtcgatcagtgtgaacgacgtttcgggcttggtgacggtggacaccgccatacgatgcgggctgatgctcgtcacgtcggataggccggaggccacagcgtcaatcggcatgcccaacgtcatcgccaccgtggctgcggcaagcgcgttcatgacgttgtgctgtccgcagatgccgagcgtgacgttggcgtgccggcctgtcttgtcttccagtacgaatgacggatggtcgagatcgtcgcagcgcacgtcgagcgcggtcgtgtccagttgcgcgtcttctttctgcggcaggccgaaccacagcacatcggccggagcgatggcgctcatcgcggccacatgttcgtcgttggcgttgaggatggtcaggccgcccggcaccagtccgcgtacgatttccgatttggcttgggcgatgcgttccgcagagccgaattctcccagatgcgccacgcccaccttgagcaccacggcgatgtccggcggaaccagggaggtgaggttggcgatttcgcccacgtgattggcgcccatttccgccaccaggaaacgcgtgccggcgttcaccttgagcgacgtcagcggcaggccgatctcattgttgaacgatccgaccggagcgacggtgtcgcccattttggacagcagcgatttgagcagatccttggtggtggttttgccgacggaaccggtgatgccgatgacggtgaacggcgattccagcgcgcgccgacgctcgatattatgcttggcgagcgctcccaacgccttgacggtgttttctacgacgatctgcggcacctgcgcgcccgcgatttcgtggtcgaccagtgcggccacagccccctgcgcgccgaccttcggcacgaaatcatgaccgtcgacgcgttcgccggcaatcgccacgaaaacggatcccggcacgatctggcgcgaatccgtgaaggcgctgatggccaccggttcgtcggtcggcacggtcgtcggcatcaaccgtccatcaaccgcctgcgcgatctccgtcaggctcatcggcatcatggtcgggctgctcactgtcgttactcctctaatggttgggtttgtgtttgatgtggagaatgtttcgttccacgtttaattcaggtcacgcgagacgcgtaacgcgcttttgatgttggctttcctcacgccggcggccagcaccatggcgatggacagggacagcgaacggctgtccgtctggccgtatgccgtcgcggcctgcgccgcaagcaggtcggattcctgggttcgtcccgcgatgcgggtctgtttgccgaccgcgcatccgaattttgcgacgagtttcgcaacctcggcatcgctcaaaccattgtcatcgcaggcaagcacatcgacgctgaccgattgcaacgcgtcctcacgcagggtctcttcatccaacgcgaggatcacagcggctgcgccgtcttcggcgcacaccgccatggtacgttgcacatcgatggccgacagaggatattccagattgaggaagcgttccaatgactgtgaatcggacgagctgatcacgccgacggggttgcccagcatgtgcaggaaatccgcgaggttcctcacttcggattccacgatctccctgttcttccccgtgatggcgaatacggccaatgcgtcggacggattgccggccatgtcgctcaccagtttgccgagctgtcccatggtgggttcggcgtagatgagcggaatctggatgtcgtcggtttgaccgcgcagcgcatggggcacaatcgcgccatatgctccctgctcctgagcctgcgacaactggtgcacgtccacatcggcggacgggacgaacagtgcgccgggacgcaccgattcgacatcatccgcgatggaagtgatcgtcacttcagccgccgacgtcggatcaagatcgaaaccgtatcggctggcaagcagccctaaagtcattcgtctgttcatggattcgctgaccgcgctcacctttccgcccctccgtgtctgaatacgtattcgctcaccaattcaccggaatagcatccgtgcgaggtgaagacgccggcacttcatacttctgcataaggaattcaccaatctccgcggtgacaggacccgccgtcaaaccgccgaagctgccttgggggtctttgagcaccacggtgatgacgaagcgtggattatccgcgggaatgatcgtcgagtaatcgctgatgatcgaggtcagttggccgttcgctccggcgacttctgctgtgcctgatttcgccgccatacgatagccgtcgaccttcacgaaagtgttgtagtgttcagcggacgattccatggcgttgagcatctggctcgccacggattcgtcgatgacgcgtgtcgcctcgcccttggactgctgctcttcgacatgccccgcggtgtcggtgatggacttgatgatgcgttgcggctttttgacgcccttgttggctatcaccgaaaccgcgttggtcagctgcatgacgttcaccgtgtacccttgaccgaacagcacggtgttgcgggttcgcctgtcccagctatccgaggggtgcagcacgccttcggattcgcctggcaggttcagtcctgtggcctgtccgataccgaatttgctgatgaagttgtaccgctgctcgttggtcatcttgtctccggcaatgaccatgccaacgttcgacgactgttcgaggatgccggcgagcgtccaatgttcgttgccatggtccaccgcgtccttataggtctgtccttccacggtcaccgtgttcggtaccgtgaatttgtcatcgaccttgtgcaatcccagttgcagcatgcccgacatggccagcaccttgccgatggagccaggttcgaaggtctcgctcaccgcccgggaggcgcccatcttcgcctggtcgcttccggcctcggtcgtatcgctgtccgccaaagcgaggatgtcgcccgactgcacgtcctggaccatggcgatgccccaagcggaatggtatttgttttcgctgtcgctcagcactttctcggtgtaccactgcacatcccgatcgatggtgagggtgacgtcggatccgttgaccgcgtctttggattcggtcatggttccggggatttcgacgccgctgttgccctgttggtacacctggtagccgtcacggcccgtcaatgtcttgttttccatctgctcgatgccggccacgcccttgccgtcggcgtcgacaccacccaatagcgaacccatcaaagtgccgttggagtacagacgttcgttgcttagttccgcgtagacgatgccgccgaggttcagcttggagattttacgtttgaccgcaggcgtcacgtccttcttcaataccacgtattgcccgctgatcgacagtttggcgcccagttccgtggcgtccatgcccaatacgggggccagcagacgagccacggctgcggctcccgtcacgccgaccggcttgccgttgatctggtggcagttgctgccggtctgtttggtgcaggtggtcggtatgaacgcctgcgcctgttcggggttgccgatgatggtgtagcgttcgacactttgcgcgagaatcgcgccattggtatccatgatcttgccgcgtcgagccttcaacgtcacggtggtggtgcggctttgcgccgcggcctgcgccatccctttgccgttgaccagttgaatattggcaagttggataaggcaggtggtgcccatcagcgccagaacgacgccgatggccatggttttcgtcaacaggttcttgtggaagaacgtgtagatcctgcggatagggttcaccgggtcttgtctccacttgcgtttgcctgatagccgttcagatcgatggtcaatgcgcctttctgcgggaccatgcccatctcttcggccttgctcggcaatgaggcgtcaagttcgtcgagcttggcctgatcgtcctcgacgtcctgggtcagctgggtgatatgcgtttcgatttggctcgcctcgaaggaattctgcaccatttgggtacgcagcatcagtgagcccagcaggcatacaccaaggaacaccgcggcgatgaccaggtgcagcagcggcgtgctgcgggtccgcgtccatgtgatgagttgttcgaagccgtgacggatgccgttgccttcgactctggtccctttgatgacgtgcagttcgggacgcgtggtgccgatggtctcggtctggcttttgcggccggccggagccgcattcgaagcgatcgttcttggtgccgccacttcagtcccttcttccttgtctggtcatgcttgcgtaatccgcgccttggtcgaaccgtttgcgccatcgtgcgggaatcggtctggtcaattccaccgcgcgcaatctgacggacgccgatcgtggattgttggcgatttcctccgcgtccgccttgatggcgccgcgggtcagttccttgaagaacggcatcatgtcgggcggcaccacgggcatatccgccggagcgtcgaccttaagcccttggttcatgaaggctttgacggttttgtcttccaacgagtggtacgactccaccaccagacgtcctcccactgcaaggtggttggcgatttgcggcagcgtgccggcaagcttgtccagttcgccgttgacttcgatgcgcagcgcctggaagacgcgtttcgcggggttgccggcgggacggtgggcctgcggcacgacctcgtccaccaaacgattgagctggcccgacgtggtcagcggctcggtttcacgccggcgtacgatttcccgtgcgatctgcttggagaaccgctcctcgccgtatgtgcggaagatacgcaccaaatcggcgaacgaatattcggcgagcacctgctctgcggtcaggggctgcgtcacgtccatacgcatgtcgagcggcgcgtcatgggaataggagaagccacgttccgtctcatcgatctgcaggctggacaatccgaggtccatgaacaccgcgttgaccttgtcgacgccttggtcggaaagcacttgggagaagtcgtcgaatgccgcgtgcacgggcgtgaaacggtcggcaaggccttccatttccatgcgtttcgtggcgagcgcgagcgcctcggtgtcccggtcgatgccgatcaggcgggcgttggggcttgctttgaggaacgctgtggaatgcccggcgaggccgagggtgcaatccaccgcgatcgagccgggcttcgccaatgccggtgccaccaagtccacgcaatcgcggagcagcaccggctgatgaatcgtcgtcacgtctgtcattagaactccatcgccggcaatacgtcatcggcaatgtcggaatatccttgttccttgtcggccaagtaatcctcccatgcctgtctgttccaaatctcggcccgggttcccacgccgatcaccacaatgtcgctgcccagattcgcgtaatcgcggagcatctgcggtacaagcacgcgtccttgcttgtctggctcctggtcgaccgcgccggaaaggaacacacgcaggtagtcgcgtgccgccttgtttcccatggacgtgcgttggatctgcaccgcgatccgtctgaattccgattgcggcagcaggtagacgcatcgttcctggcctcttgccatcaccatgccggagcccagttggctgcggaacttcgcaggcaatgccatacgtcctttggcgtcgattttcggagtgtaggtgcccagcagcaatggcggcaagtccgccatcatgccgccggattgagccggatcatcgtcggagacgggttctgctccaatgtcatggaccattaccgcacctcctttttgcccacactcggcccaccaatccgagacactttccccactctaccccaccgctcaccatttttccccacgaaaaagcaaaaatgcctcaaaatattgtcgatttctccccatatttgagattgcgcgtccgcaccgtacagttccggcattgtcagcccgtcacgattcgccgcggccgatcgccgcacgtagaagccttggggtacattagagtgccttaagtttttgatgaagggacagcaatgtcgagttattccgcccagttgcgtgaggagcaacaggccgtcagccgcgcatatgatcgtctggacgcgttgagggcgcaggctcggtcgcgtctcgacacggtccgggccgcaggatcgcacggttcgcccacgcaacgcaccgaacgcgattccttcgccaccatgtacgaggaccgtctcacccagcttcgtgcggtggaggatcgtctggttttcggcaggctcgacgacgtgcatggcgcgcatcgctacattgggcgtatcggcctgtccgatgaggatcatgagccgattctcaccgactggcgcgccgacgcggcacgcccgttctatgaggcgacgccttcgaatcatggcgacatcgtcatgcgccggcatatcacgttgagtttcagggaagtggtcggcgtcgaggatgaggtgctcgacgcgcattccgatcaggtcggcgaggcgtcctccaatggcacattgaccggcgagggtgctctgcttgcgtcgcttaacgccaaacgcaccggcaagatgaccgatatcgtggccaccatccagggcgagcaggaccgtatcatccgtgcggacctcaaccaggcggtggtggtgcagggcggtccgggaaccggcaagaccgcggtcgcgttgcatcgcgcggcctacctgttgtatacgcatcgtcgcgcgttgcagcgttccggagtgctggtggtcggccccagctcgacgttcctgcattacatcgaccaggtgctcccctcgctgggtgagacgggtgtggtcagccgtaccatcgcggatctgattcccggcatcatcgccaccgcgcatgacgacccgtatgcggccaagctcaagggtgaacgccgtatggccaaggcgatcgccaatgccgtggcggctcgtgaacgcgtgccttcgcatctgccggtcatccgcatcaacggtttcaacgtgccgatggtacgtgcggatatcgagcaggccatcgccgatgccaagcgcacgcggcagccgcataacaaggcgcgcgagaccttcgtgcgcgacatgctgtcggccatgcgcaaccggtacgtcgaacggcttgactacgagccggagcaggccgagcttaacgatgtgatgcagcagttgcgtatgaacgacgatttgcgcaagacgctgaacctcgcatggctgccgatgaccggcgaatggttggtcgaccagctgttcgcgaaaccgcagcaattgcgccgtttcgccccctggctcgaagagcgtgacatcgagacgctgacgcgtccgaagggctcgcccttcaccgtcagcgacgtacctctgctggatgaggccatggaattgcttggaccggatccgaaggccgtggccaggcagaaggcgttggatgccaagcgcgccgaggaagagcagttcgccaaggacacgctggcgcaggccggtatcggttccggcatcgtcacttcgcagatgctggtggacaatatcaatggtatggacgccgaattgaccgcgcagcgcgccgcggccgaccgcgagtggacgtatggccatatcgtggtggatgaggcgcaggagctgaccgcgatggattggcgcatgctgatccgtcgttgtccgtcgcgctcgttcacgattgtgggcgacgtggcgcagacctccgcgttgggcggtacccggtcctggcgtcgcatgatggacccgctgttcggcgaacgcaactggcagctcaacgagttgacgatcaactaccgcaatccgaaggaggtgtcgcagctcgccagcgatttcgcctcgtccgaaggcctgtacatctccacggtgaacgccgtgcgtggcgtcccggattcagtcaagcgtctcaccttgcgtgacgatagcctgatcggcgacgccgtcgcgcagcagaccgtcgagttggtgcgcgcctacgtttcctccgacggtaccggtcgtgtggcgatcatcgcaccggacgatatgctcaagccgttgcgcgcacgcgtatacgcacaacttcaggatgagctcgacccgaaggaattcgacaggctcgatgcccagagttcctgggacgagcaggtcaccgtatgttccacacagaccgtgaagggtctggagtatgatgccgtgatggtggtccagcccggacgaatcgaggagaacgcgccgtcgcgtatcgtagcggcctccgatttgtatgtcgccatgacgaggcccacgcagcgtctgcttatactgcggacaaaaaacgacgaaaagctgctcaagctataaggtaggaaccatgcctaaagcattgttacttgaaaacatccatcccgacgcggcgcagtcgctgcgcgaccatggcttcgaggtcgagtgcctcaagggagccctgagcgaggacgagctgattgatgcgttggaaggtgtcgacctgctcggcatccgttccaagaccagtgtgacccgcaaggtcatcgacgcgcgtccgacgctcaccgcggtcggctgcttctgcattggcaccaaccaggtggatctcgaatacgcgggcaagaacggcatcgccgtcttcaacgcgccgtattcgaatacccgttccgtggtggagctggtgatcggcgacatcatctgcctgatgcgccgcattcccgcgcatacccatcatatgaagcacggcatgtgggataagtccgcctccggctcccatgaggtccgaggcaagacgctcggcatcatcggctacggcaacatcggctcccagctttccgtcgtcgccgaggcgcttggcatgcgcgtgctgttctacgacattgaagagaagcttgccatgggcaacgcacaccgctgcgacacactcaacgaattgctggaacagtccgatgtggtcacgcttcatgtggatggacgcaagtcgaacacgggattcttcggcgaagaccagttcgagcatatgaagcaggatgccatcttcatcaacctgtcccgtggtttcgtggcggatttggatgcgttgaagaagcatctggattccggccatctgtccggcgcggcggtggacgtgttcccaatcgaaccgaagaagaccggcgacgagttcctgaccgaccttgcggacgaggacaacatgatcctcaccccgcatatcggcggctccacgcttgaggcgcagaagtccatcggacagttcgtctcccagcgtcttgaggattattggttcaagggttccaccatgttgtcggtgaatctgccgcagatcaccctgtccgacatcaagtcgaatttccgcatcgcccacctgcatgcgaatcttccgggtgtgctggcacgcgtcaaccgtgtgctgggcgaggacggcatcaacatcgccgcccaggccttgggcacggaaggcgagatcggctatgtggtcaccgatgtggcgcagcgcccggaccagaaggctctcgaccagctcgcctccatcgagggtacgatccgcatgcgcgtgatcagctgagcacgcaatacgaaacgttacgataatgcgggcggggttccaaccatcaggattggaaccccgcccgcattatatatgctgtatttgcttacggatgcggcacccgtctcacgccatcattcggaacttgcgcccttcagctcgtcgatggccctttggaagtcctccagattctcgaaattctggtagacgctggcgaagcgcatgtacgccaccatgtccaagtcacgcagcggcttgagaatcgccttgccgacctcatcagatttgacttgggccaatcctcgtgaacgaagatcctcctcgaccttctgccccagcatcttcagatcgtcctcgttgatgggacggccctggcatgccttgcgcacgccggaaatcaccttattgcggtcgaattgctcgacgtttccggaacgcttcacgaccaatagcatggtcgtctccaatgtggtgaatcgcttggagcatttcgggcattcgcgcctgcgacggatggagtgaccatcgtcgctaatacgggtatcgaccaccttggtgtctggattctggcaaaacgggcaatgcatgttgtccagaatagactgagcccttgaaataagccacgcttggcggcccctacgcctcatggggaacaatgaggcgctgccccgcatgcaaagacaccgtatcaaggttgttcagccgcatcagttcatccaccgtatctccgacattgccaccctccggagtgatgctcgccgcatacctccacaaggtgtcgccgggttgcaccgtatacacgacgacagcgatggaatccggcgcggactgcgcacttccgggcgcgatgaatccaaaaagacaccaggcaagaccggccgccatgatcgccatggcgattcgattcgccacatttccgatattcgccgcaccgttcaccacgccactccttttcgaacagctgttctatcgaacgcttgttccaagtatggcacatatgttcgataaacgcaaacacacctcgaacagatgtttgattttatcggcgtttcgcgttatgcttctaaggaactacgaaaggagcccatcgtgagcaccatccccttcacgcccaagaagagcgacgaacgtccggatgaaagcacgttgaccgaccgccagcgcaaggtgcttgacgccatcaaaacgcatttggccaagcagggattcgctccttcgttccgtgagattggtgaggccgcagggcttaaaagcccgtcatccgtcaaacaccagcttcaggttcttgacgaaaaaggcttcatccgcatgaacgcgaacaaggggagggccatcgaagtggtgaacctcaatgacgaggagccgaatggaaaagtcgcccaggtcatcccgttccccagtcaggacgatgcatgcggctccatcatggcctcgcatgacgttccactggtcgggcgcatcgccgccggcgtgccgatcacggccgagcagcatgtcgatgatgtgatgaggcttcccgaacggcttaccggcaccggcaatctgttcatgcttgaagtgcacggtgattccatgatcgacgccgccatttgcgatggtgatttcgtggtggtccgcgagcagaacagcgcggagaatggcgatatcgtcgccgcattgctggatgacgaggccacggtcaagacgttccgcaaggatcacggccatgtctggctgattccgcacaatccggcctactcccccatcgacggcacgcatgccgagatcatgggcaaggtcgtcaccgtgctgcgcaagatctgattgctttcacacgttaaacggcaaagggcgtcgaacataccattttgaggcatgtccgacgccctttgccataccctttgccataccgcgcggttgtgcattcaccttgcgaatccatcaagaatgaacgcgagggcatttcaaaatgtcgtcgcattcttgaagttcgggagcacggttcaggaatgcagttccttgcggctgtccgaatcgtatccttcaggttcaagctggaaggtggtgtgcggcacggatacggggaagtgctcacgcaggcagttctgcaattgggagaggatgtcggcggcatcatccatggtcagcccgcgctccactaccacatgggccatgacgacgggcatgccggtagagacggtgctggcgtgcaggtcgtgcacggccaccacgtgcggcacctgctcaagatgttcgcgcacctcgtccagatcgagttcctgtggggtttcctccagcagcacgcgcacggcgttgcgcagcagcacgaacgcccgggggatcatcatcaatgcgatgatgccgcccgcgacggcatcgaagccggcccagcccgttgagatcagcacgatggctgaaacgatcacggccacggaccccaatgcgtcgttcatgacttcgaggaacgcggctttcatgttcatgttgtcctcgctttgccccgcgaggatgaagatcgaaccgacgttggcggcaaggccgagtatgcccatgaacagcagcaaccgcacgtcgtgcacttcgtcggcggctccgccgaacagcctcatgccggcttcgacgagcgcgtagatgccgacgatcaggagcacgagcgcgccgaccgcggcggtgagcacttcgagtcgcgcccatccccaggtgcgtttgttgctaggtttgcgttgcatgagcaccgcggtgacggtggaggcgatcagcaccgacatgtcggtgagcatgtggccggcgtcgaccagcagcgccagcgatccggtgacgatggcgctgaccacttcggcgatgaacaccgtggaagtcagccccaatgacatcatgagtcttttctggtgttcggccccgcttgcggcggtcgtggcgtccacacccgcatggctgtgtgccatgatgggtttcctttcgtcgtctttggttcgatccgcggctattgaaaccgcttctcaataccattttcattcgtctcaaaacgcaggaaaccccagtccgaaggctggggtttccaagttctgctgacagtctagcggctcaccgctcccctgtcaataaagtcaaaccgtcaattaaaaaccgaactgggcggcggtttccttcagcgtctccgcggagcgcttcagggccgcgagctcacggtcggacaccggggtgttgatggcggtattgacgccggaacggttgagcagggtcggcacggacatgcacacgtcggagatgccgtggaagtcgtgcagcatggagctgactggcaggatgcggttggagtcgcgcatgacggcttcgatgatgtccacgccggacatgccgatggcgtagttggtagcgcccttgccgttgatgatcttgtaggcggcgttcttgacttcctggtggatctgctcacgcacttcggcgtccagcggatcgtggcccggcagcggggtccagtcgcacatcgggacgccgccgatggtggcggaggcccacagcgggacttcggaatcaccgtgttcgccggcgatgtaggcgtgcacgttcttgacgttgacgccggtctgctgcgcgatcaggaagcgcagacgggcggagtcgaggttggtgccggagccgaagacctggttggccggcaggccggagatcttctgggccacgtgggtggcgatgtcgaccgggttggtgatgagcatgtagatggcgttcggagcgaccttcacgaggcccggaatgatggccttgaggatgttgatggtggcaccgaccagctcgaggcgggactggcccggcttctggcgcgggcctgcggtgatgacgatcatgtcggcgtcacggcagatctccggatcgtcggagccatcgatggtcacggtcggatagaagctggagccgtgctgcatgtcgagcacttcggcctcgacgcgttccttggcgatgtcttcgagcacgatctcacgtgcgacgccacgctgagcagcagcgaaagcgagagtggagccgactgcgccggcaccgatgatagcgagctttgtgggcttgattggtgaatccaccatgtgctttacctctctttgagcaagaagaacgtcccgcgttgtggcagggtattttctttcgatttcaaccctactttatccatacagcatgacgtttcgccgtgaatccgcatgatttgcaaccactgaaaagtgattttcgtcacagcttttgtgagcgctcacatacactgcgcccgttgaaatgcagctgttgcaatccgttgcagcgtttgcacggccgctccggcaaacgtcatcgggaacggcttgcgcggaagctcagtcgatggcctgctccacgatctgcgcggccagctggtcgtcgacctccgcttcgagcatcatgccgtcgtcgcggtattcgacgttgatcaccttgccgtattcgcgcacgcgggacatgagcgagccggctgtgtacggcagcagcgcctcgacgtgcacgttcggcgtgggcagcatcgattccacgtgctcgcgcagtgcgtcgacgccctcccctgaaaacgcggagacgatgtgcgcttccggcatcagcgcctcgatacgttcgcgtgcggcctcgtccatacggtcggccttgttgaacgccacgatcgtggggatcgtctcgacgccgtcgatgtcggacagcacgtcgttgacggcgtcgatctgggagaacgggtcggggtgcgaaccgtcgaccacgtgcacgatcaggtcggcgtcggcgacttcctccaacgtggatttgaacgcttcgatgagctgcgttggcaggcggcgcacgaaaccgacggtgtccacatacgcgtacagtcgcccgtccttggctttcgcacggcgtacggcggtatccaaagtggcgaacagcgcgttctccaccagttccgcggaaccggtcagccggttggtcaacgacgatttgccggcgttcgtataaccgaccacggcgacggtcggcaggccgaagcgacggcgcgcgccacgtttaacgtcacgcgcgggcgccatctgtgcgatctgccggcgtagtttggcgattctgctgcggatcacgcgacggtccatttcgattttcgtctcacccggaccacgcgagccgatgcccgcgtcgcctgccgcacggccacccgcctgacgcgacagcgacccgccccagccgcgcagtcgcggcagcatgtattcgagctgtgccagctccacctgcgccttgccttcgcgcgaagtcgcatgctgtgcgaagatgtcgaggatgacggcggtgcggtcgaccaccttcactttggtggcgtcttccaatgcgcgtcgttggctcggcggcagatcatcgtcgacgacgatggtgtccgcctcgtcctgcgccacgatgccggccagttcgcgcgccttgccggaacccacgtatgtggccgcgtccggcttgatgcggtgctgcagcaggccgtcgcacaccacggcgcccgcggtttcggcgagcgcggcgagttctcggagcgattcctcggccgcggcctgcgtggtctcgcggctggaccatacgcctacgagcacgacgcgttcgagcctgactttacggtattcgacttcggtgacgtcctggatctcgcccagacccgccacatgcttcaatgcgttgcgggattcgcgttcctgccactgttcgtcgtgggtttcgcgaaggtgttccccgccgttggtatcaagcagcacgtcggattggtcggcgagcactcccccgacgtcgcctgcggtcatgctctgctcgatatcgttgtcttggctcaatggcacctctcacggttgaactatggtgtctttattatcatcattgtctagagacatgggcatccatgctttcgccacgtggacgggcgcggcgaaaaacaccatggattgccgcagacgagcgtttgcaaggagatcggacatggcacaggccgaacagtatttcgcggcggagccgcagtcgaaggacgtgcgcaaaacactgcacgtcacgttgcgcggcaacgaggcggacgtggaggtgtcaaacggcgtgttctccggcaaccgcgtggatttgggcacgtcggtgctgcttcgccaggcgccggaacctcccgaggagggcacgttcctcgacctgggctgcggttgggggccaatcgcgttggcgttgggcttcgcttcgccgaaggcggacatctgggcgttggacgtcaatgagcgcgcgctcgaactgacccggcgcaacgccgagctcaacggcatgggcaacatccacgcggccacggccgacggcattcccgcggagacgacgttcgacctgatctggtcgaatccgccgatccgcgtcggcaaggaagtcctgcacacgctgctcatgacatggctgccgcggcttaacgcgggaggcgcagcatatctggtggtgcagaagaatctgggttccgattcgctgatcccgtggctcgccacgcagctcggcgacggatatgaggtaagcaagtacgcgagttcgaaaggcttccgcgtcatcgaggttatgaaggcatgaaattcgaatatccctcccaactgccggtttccacggcgcgcgacgacatcgccgaagcggtcagagcaagccaggtggtgatcatttccggacagacgggctccggcaaaaccacgcagctaccgaagatcctgcttgagctgggccgcggctcgcacggcaggcagatcgtgcacacgcagccgcgcaggctcgccgcacgtaccgtcgccgaacgaatcgccagcgaaatggacgtgaagctgggcgaggaagtcggctatcaggtgcggttcaccgacgaaagctcgccgaagacacggctgcgcgtcgtgaccgacggtatcctgctggcgcagatccaacgcgatcccaagctcatgcagtacgacacgatcatcatcgacgaggcgcatgagcgcagcctgaacatcgacttcctgctcggctatctgaccgcgttgctgccgaaacgacgcgacctgaagctcgtcatcacgtccgccaccatcgattcggtgaagttccaggagcatttcgaacacgcgctgcatacgaaagcgccggtgatcgaagtgtcgggacgcacctaccccgtgcagatcgtgtacgagccgttgggcaccgcgccggcgctgatgcgctccgtgccgggcttcgaaaccggcgcgatgccgggagacgctgactacgagagcctgtccgcagcgccggatggcagggacggccgcgattcacgcgacacgaacgtggacatgcccaccgccgtggcacgcgcctgcgccgaactggtcatccattcaagccacgaccgcgggccacgcgacatcctcgtgttcgcctccggcgagcgcgacatccacgaattcgaaaacgcgctgcgccgccattacggaccgcgcgcggcggacatgcgccgccccgacgcgatcgagatcgtgcccctgttcgccaggctctcctcgaaggagcagcataaggtgttcgagccgcacgagcatcagcgcatcgtgatcgccacgaacgtggccgaaacgtcgttgacggtgccgggcatccgatatgtggtcgatccgggcacggcgcgcatctcccgctattcgaagacggcgaaggtgcagcgtctgcctatcgaaccaatcagccaggcgagcgcgaaccaacgttcgggccgctgcggccgtatcgccgacggcatcgcgatccgcctgtactcacgtgaggatttcgagacgcgccccgaattcacggagccggagatcctacgcacgtccctgggcgcggtcgtcctgcacatgctgtcggtgggcgtggcgcgcaccgcgcgggatgtgacggatttcggtttcatcgacccgccggatatgaaggccgtgtccgatggtttcaacgagctgaccgaactgaaggccatcgcccgcaaacatggcgaagtggtgttgacgcatacgggccgcatgctggcacgtattccgatcgacgtgcgtttgggccgtatggtcatcgaagccgcgaagtcgaccacgccgaacactctggcggcggtgctggtagtagtcgcgttcctgagcctgcaggatccgcgcgaacgtcccgacgagaaccgtgaggaggcggatcggatccacaaccggtatgcggacccgaccagtgatttcctgaccgcgttgaacctgtgggaccgcgtgttccaagcggatggcgagccgagcaattccgcgctgcgccgcatctgcaagaccgagtacttgagttggctgcgcatgcgccaatggaaggatttggtcgcccagctgcgcgaaatgtgccaggagttcaaattcaagcttggcgagccgattcccgtgtcccgtccaccgttggagatccgccagctgccgcttaaccagcaggcagcgcattcgctgtgctgctcatgggacgcgcagggcatccacacgtccatgctttccggcctgctgtccatgatgggcatgcaggtcacgcgcgagccgaaggcatccgatttcgctggtttgaagggtgcggcacgcgctcgtgcgatgaaacgcgcgcagaagatggcgaagaacgactatcagggcgcgcgcggcacgcatttcgccctgttccccgcctccgccgtagccaaatcgacaccgcaatgggtgatgagcaccgaactggtggagacaagccggctgtgggcgcggtattccgcgcagattgatcccgcatgggcggagccgctcgccggagcactcacccgtaccacgtacgcggatccgcactggtccggttcgcgcggctcggccgtggcgagcgcgaaggtgctcctgtacggcctgccgatcgtgcaggaccgcaccgtgcagtgggggcgcatcaatccgcttgaggcgcgcgatttcctcatccggcagggtctggtggagggcgacatccagcaacggttctcctatgatgatttcgtcaccaggaaccgggacatcctcgaggatgcagccgatgatgcgagccgcacccgccaggtggcgcagaccgtcggtgacgaggatctgttcgacttctacaacgtcatcatccccaacaccgtcaccagcgtggccgatttggcgaaatggtggaagacgaagcacgacgagcagcccgatctgctggatttcgatccggacaaggtggagcgtctcgccggctccgattcggtgtccctggacgactatcccgaccattggcatacgctcggcaccgacggctcccccatcgatctaaggttgagctacatctacgacccgcacgacccaaacgacggcgtcaccgtgcatgtgccgttgaaagcattgtctcgactgactccggaacagttctcgtggaatgtgccgggattgttggacgagctgatcgtcggcatgatcaagtcgctgccgaaaacgttgcgcgtgcagttcgtgcccgctccggacacggcacgcaaaatccgcgcctggatcgacaaacgctatcccgacctgccgggctccggcagccagcaaaagcctgacatcgcccccgaaaacgaggatggcatggccgcatggcccgacctgccgcacgtgttcacgcaggcggccatcagtatcgtcggcgcgcaaatccacccggaagtcctcaccggcgaactatggaacaagctcgcgccatacctgcgcatgaccttcgccgtggaacagcagctgccgcccaaccgcaagaaccagcacggccgacgacacgcgcgaggacccgtcaaaacgctcggcaccggcaaatcactcgtcgaactgcaacgcagattcgccgaacaagccaaagcctccgcacgccacatggtcgaaaaacaagcccgaaacgcaggagaccaaggcaagttcgtcgaacaagccaacctgctcaacaaagcgggagcgaccaccgaagcacgcgccaccatgctctggcaaggcgcgctcgacacgctgcgcctgcccggtgaacgcatctcctcacgctggctcggcacggaagcgctcatgctcgcctctgccccctacaagtccacgaaggagctcaccgaagacctgcagctggcagccgtcaaacggctcctgcccaacatcgaccagctgcccgacgacgaagcgctcgccgacgcagtgctcgatgtgcgcgaagtgtacgaggacaccgtgtacgcggtggcgcatgacgtgatcgccatactgaaacggtatgcggaagtcgacaaagccgtgtccggcaaagcggacctgccactgctgagcgtgctgcagtcgatccgcgaacacatcgccacactcgtataccccggtttcatcggcaagacgccgccagaggcattgccgtccatcgaacgatacctgcacgccgacctgctgcgcctcaccaaggcgaaaaacgacaagaaccgcgacgtgcgatgggcttgggaagccaacgaagccaaacaacttgccgacaaggccgtggtgaaagcacaacgtgaaccagccggcccacgccacgaaacgctgatgaagcaggcggaaaccgtacgttggatgctggaggaattctacgtgtccctgtgggcacaggaactcggcacgccgaaaccgatcagcctgcaacgcatcaaaaaggcgatcgcctagccaccagccaaaaccccaacggattgttccgtttcttcaaacccgtcaacgcttcttgaagaaacggaacaactgcgattcacgaatcaacaaccccaccaatagactcgccaccatgacaccggcgaacacagccaacggcgtgcgcaccgcagccgccaacaccgccacccaatcggaccggctcatccgcaccgcatacgccaacaacaacgcacacgaagcaaacgtagccagcccggcccaaacaccggtctccacaccaatacccagcaactgcgcacccttcgactgccccgaatgcaacgcacccgcatactccaacctacgccggcgcacaccaaacacaccaaccaacacgccaatcgccaaccccacccacggcatccaccgcgtcgaacgattcagatacgacgcacgcgcgtcataatgcgcatcaaaccccttattcacctgcgtcacacccgcattcgacgagccggaacccgccaccaacgtggcatacagcagattctccgtctgcccatcaaccggccactgcttgacccagcattcgtcaaacgtcgaagcgctcgccgacaccggcacgatgaacgcgtaggcgaaacgcgtgtcacgcccatcgttcggccagtcgaacacaccagccacacgcgtagtgccttcgcgtgtctgcaatgcgctgcccacggcgagcccgaagtccttggccacgtcgcgcggcacccatacgccggacacgtcggccttggcattgccggcgatcagccggatcataccgggtgtcacgtcatacgatgagatgtccttgccgggtgtcgcgagtggcacgacctgtttgccggcacgcatcgcgccagccaaggtgcccgtcattccatcgccagcgtcggacaaccggtcgcatgcggtgccatccaccgttccaccgacgatggcgttgacgtcagcgtacgcgttgatgcgctgcacggcctgcgattccaagtcgatcacggtcatcgcctcatatccgcccagcagcgttccggagagcagcacggcgaggaacatggcgaacgcgcggctcacgcccgagccgatgttgcgcagcgcttcggaaagcaccgatccaagtctcatatacgcttccttattggcggtttcatgcggttttcacactgtttggcgaagttcaacggtttcttgcgattcgtccgccgactatttgcaaaccagcccgttgagcccgctgccgatttcgacgttggcgatcgcggacgcgtcggcatcctgtacctgcaccagactcacgcccagctcgctgcccacaatcgtcaccttcgccggcgtattggatgtgttacgggattttggtacgatgcagccgctgctgccgtcgatgccgaacaccgctcccgccggcacacgcagcacctgtaatggttccttcaatgccacggtggcatcgagaccggcctttttggtctgcatgtccatggactggaacgtttcgcttgccgacacattacgcaggaattcggcgtcggtgatttccgtgttatcggccggcaatattccattgacgccatacatgcctatagtgcgatcctgtcctaccgccgcgccgtttttcacggtgagtttcgtcaacgctcccggtatttttccgattgccgtaccgcccgtcaccatggaacctgtggtggccgtccactcgtcgaccgcgactgcgttttcaggaatccacatggtgtcggcaagcgcaagcgtgccgtcggaggggttgccgttgtcgttcatgagttgccgccagccgtcggatgttgcccaccagtaggtgtcggaaccggccacgctgttgtatccgagtcggctcagctcgttgttcagtgcgagcacgtcgtcgcccttgtctccggttttgaggtcacggtataggggtgtggcggtgttcaaggccacgaccacgcggtcgttgactttgtatgcgcctttgccggaggcgagtccgtctgcggaccagtcggcggtgacggtgccgttggcgttgccgagaagattacgttcggtggagatggtgggcacaaccgtcacttgctggctaccggagtattcctgcacgctggctggcgcggtggtcgtctcccctgccgagccgagcaatgccggcgcgcggtctggcaagagcagcgcgcatgctcccacggacacgcatatggcggttgccacggcgagcaggctccaagcccatgcgagtcgtccgcgtctggcaccgttgttcatgactttagtgccccgttgcttctttcccatgaatcgatgcctttctattcgtctattcttccaattccggttcctgcgatttgctgccgcctggcgcgtagtcggcgaggtcgagcacacggtcgcaggcgtcgcgggtgtcgggatcgtgtgtggccacgagcacgatcatgccttggccggaaaggttgttcagcacatggctgacggaatgcgcggtgcgcgtatccaattgagcggtcggctcgtccacgagcagcatgtcgggtttggagcagacggcacgtgccagcatgagacgttgcgcctcgccgccggagaggtcggagaaccggcggtcggccgcgtattcgaggtcgaacagccccatggcttccaaggctttgagctccgcttccttgcgccgcatgcctttggcgagcagcgggaacaccacgtggtcgagcgcggtgcgttccgccacaccgtacgggttttgaaacacccatcccacacggttcacgccttcacgggttacggttccggcatatggtttctcccaaccggcgagaatcgacagcaatgtcgatttaccacaaccggatggtccgcataccgcgatggtggagccaggttccgccacgaaatcaagatgctcgaacagcaggtctgtccccgggaaccggtgggccagcccttccacaaccactcgcatatgagccccttcgcgcatcagactacttcagcggataccagaccgtctcatccgaggcggtcacgttcactccggccgtcaccaagcaggtcagcgccttcctgttatcgcgcagtcctgcgctttctccggattccaaatccttctccagcttatcggcgatgtagtctttgggctttatgccttccttgcgcagacagtcggccgccacctccttgtcattgagcagcagcttcggattgcccaactggagcctgtacacggtgttgatatccgtgacatgcagcatactgcaggatgtcagatcgtcattgagtttgcggatcgcctctttgctggcaccatcggtgttgtacgagggcagagcgtaaatgccgttgtcgtacttgtcgaacgtcggctcggcatagcctttgtctatgatgcactgcttgtaatccgcccatgcgcgttcgtagtcggcctgactcacctttccgcccgaagcggccttctccagtgcagacttctgctgatcggatattttgccgccgtcggaatccaacaacgatcgcgcataatccttcagcgacgacgcgattcgttcaccctgttgcgatgattgaccctgctgggattgacgctcccgtcgcgagctttctttcagtgccccgcagcccgtgcagccgacaagcaaagcgagacagcatatgacggcaatagctttgccacgcatgcccgttttcctcgacatcgtcatcagccccctcacaaacgacgcagccgtcaggccgccatggcccgctttacccctattctatacccccaagacctgccgtcacgcgcggcatacccaatatgggtatgtggaaccaggtgttccccagcatcatccaccggctcgttgcatttaccccgttctccgcgccggaaagccatcagtcaaacggaatgcgcgcgtggaacatccatatgccgttctcgcaatcggtggaaagacttcctccgatatgctcgatttcagccgcgaactgtctgagaccatggccaccgggcaggctgccggaatgccgggcacccatatcattcacttcggtgatttccaaggaatgcgcctttaccagaaccgacacctcgtacttgcctccggaaggcgcatgacgcgaaacgttcgcgtacacctcgccaatcaaccggccgatcacatccttatgataggcatacggacgcgcgcacgggaccagaaataggcgagaccggtcagcataatctgcatgacggtaaacatcaatgccattggcgaaccggggtaacacaccgcctcatagaccatcagaagttcgcacgtcatgatggccgcaagacggaacggatgtttgattcgcggcatatccggccaccggagctctttgttctttccggtcatgtcagcgctcgttcccatgtttcaaccatgtgatgatggcttgccgttgcgtacggcagttcagtcgtttgacgatgttctgcatgtgcttgcgcacagtggcgatggatatgccgagtcgttcggctatctctccatccgtcagatattcgttcgcgcacaggttcatgatggtttcttgcgtgttggtgagcgtggactccgctcgagcatcgcatttcagcctcgcgtaagccgccatcggagtttcaaaaccgggcaggaaacatcctgaaaggacacgggagacggcttgttcgagctgtgtctcgtcacctttaccgacaagcccttgcgcgccagccgccgccagcggcacgcgataccggttcagactgaagctggtcatgccgagaatcggcgtggaacagtctgtcagccgcatgcgacggcagacttccgggccttgcataccttccaacgacatatcaagcagcacaagagcatattggtcggcatttgatgcaaacaattccaaagcctcaactccgctggtagccgaatcgacgatacccaccgccggaagaatccgcttgaataggtcggccagcgcttcgatgacgattttgtcatcgtcaacaagcaatatcttcggaccaccaaccgttttccccgtcatggtacaacgctccttcccccgggaaacatccccctgccgcaatacaatacatcatttcatcaccaccccttactcatattgagtagatcgttcgcaataaccccgtaaaacaactcatatcatatgaatcaccgggccaaggcagttcgatatgatgatgaaaggtggacgatgatgtcctggatgaaacacaataaattgatgaaaacgctctccgcatcagtactggctgtcggaatatgctatggaacactaccaatactcgtgaggctctcctagattgtcaaagatacaaacaaagcagaggtatatgacaaacttttcgatgagttgccgctgcatggccatcggtctgacggtagtatcacttttgtccggatgctcaagacaagtctccgatacagcatcatctcccgaaggcggtggaactacttcttccgaaccgatcaagcaatatatagcatcggtgatcaaagacaatgacgatcctcgcgcgacgtatccgatgaccaaagcccaacgggagattctcaaacgttcggaagcggctggaggcgtgtcctctaccgattacgaactcgcttggtcccattacaaacaatgcgtggtcgacaaaggatattcaaccccagtacttgaccgttatcccaatggcctgtatttcgtcgccagaataaacgccgagggcatgaccgacgaacaacgaaacaaattcaacaaagacgatggcgtttgtttcaacacggaagtgatctacatcaatgacacatatgccctccaattgggcaatccgcaaatgatcaacgatgtcaatcaagcggccgtcaattgcttgaagagggagaatgtggcaccgaaaggctatacgaagaaactgttcgagcaagacgagaaaaaccgcttgcaggacgagcacactgagctgaattactcggatcccaaagtccaaagctgtctggccgcgctcggcatcaccactatggaaagcgataaggtgtggagacctgcgaaaacttccagctaaggcaatacaaaaaacaaacaacgaaaccccatcaaggctcgtctatcacgagaaaggagatggcgatgatgcaactgaatatgggtacatggcgaggaagcgtagccatcgtatgcttcctcgccatgcttatcggctgcacgggttgtgggacggtcggcgatcggcaggatacgcaacagcagactgaaagtgccggcagtgacgcttccaagaccaaaatcgcgaattcgataccggattacatcgatttccttcttgatttggacgccaaacccgataccaaatatcccatgagtgacgcacagaaaacgattctgaagcgttccagaaagtcgggaagcgtatcgaaaccggattacgagcttgcctggtcgaattacaagcagtgcgtgaccagctatgggtatacgacaccggtgctcaggcagttctccaatggcctgtacatgatcgccatgcgggataccaccggcatgagcgaccaacagcgcaagaagttcaacgaggatgagaacaaatgctataacactgaagtcattgcggtgaccggtgtataccagatgcagatcggcaatcccggcatgctttccgatggcgaccaggccatggtcgattgcctgcataaggccggtatcgtgccgaaaaactacgacaaggaagcgtacaagaaggatctggacgcgcacgccaaaaaccagcccaccacggtggatttctcaaacgcggaaatgcaaagctgttgggtggcgaacggcgcgtcgttcggagacgtcaatgacaccgatcagtggaagccgctcggctgaccaccgtgttccccgtcatatatcagcatagaagtctcgttcctgcgcgacgaacgggcgcagcatcgtggtgatgacgatggcgcataccaggaacagcgcgccgacggggccgagccacatcagtccgaaatggccgttgattagacctccgaccgcggaaccaagcgcgatgccgatgttgaacgacatggaattgagcgacgcggccaagttgagcgatcccgggtgcgattgtgaggcgacgtccatatacagcacctgtgacgcggaattctgcagatacatgaacatgccgagtaccacgagcagcaacgcgccgtataccggcacccaatgcgccacgacgagcgacgccataagcaccgcgtgcgcgcagtagatgggacggatgtgagtcagcggctccactcccctgccacggtcggccagtttgccgccgtacaggttgctccacaggcatgccgcgccgaaaatcaccagtccgacgctcaggtactgttccggcacatgaacttcgtcgcgcatgatcggcgtcagatacgtgtagaagacatagctggcggccgcgccgaacaccacggtgagcacaccaagctggatacgacggtcgaagaacaggcggaactgcggcaggaagccgattttcacgatgtggctgttgcgcggcagcgccacgaccataccgacgatgagcataatggtgagcacattgatcatatggaacgcccaacgccaaccgaacgtgttggccacccatgtgccgaccggcacgcccaccacggatgcgatggagaagccggagaacacccatgcgatgaatttcgtacggaatctgtccgttgtcacatcgggcacgtacgtcatagccacagccaccaacgttccggataccaaggcgatcatgatgcgcgccaccaccagaaccgcgtaattgggtgcgaacgcgcacaggagattaccggcaaggaatatgccgatcagcgtcagatgagtggcgaatcgcgggaaccgtgccgacagcgccgagccgagcggcgtgacgggcgcgtacacgaaggcgaacagggacaccagattgccgaccgtcacctccgatatcttcagatcggctgcgatgtcgggcaggatgcccaccatgatgaattcactcatgccaagcatgaaactcgatgcgatgagaatcaccaccggcagattgaagaaccgttccttgtcgattcgcacttttccgctctccgcttccgttcgcattcccctattcgtttcccgatatttcgatttgtttagcatcgcttacgtcaatcgattgacgatttactttcttcaggaaaggataaaccgcgcgcgatacaatacggtaccgatgacacgcaagatgacacgcaaaaccaatcggagcggaaacagcggcgggaaaaccggcggaaacaggtcacgcaaccgcaaaacaagcaatcgcaagacgggcaaccgcaaatcccttgttccaaagaatctgcgcagaaaactgcgcaatacatggaacaaggcgagcctcaagcaacgcatcggcatgatcgccactacattggtggcgacggtcgcggcgatagccatcattgcgggcctaatccgctttgtcggctggcgtgtgcaggtcagtgaggcgaaagcggcgcagagcgagatgcgatcgctgtacgatttcaacccgggcaacatcatatccgacggcgcgttcttcaacggcaacgcgttaagcgagcggcaggtgcagaccatcctcgaccagcagggcgcgacgtgcaccggcgacaagtgtctgaagaccatgacgttcaccacgcaatcgcaagcggcggacgaatattgccaagcgtataagggcggacagaacgaaagcgcggcagccatcatctataaggcgggcaacgcatgcggcatcagccagaaggtgctgctcaccgtactgcagaaggagcagcatctgctcaccgccaccgatccaagcgattttcaattcaaatctgcaatgggcctgagctgtccggacgacgcgaactgcgatgcgaaatacgccggattcttcaaccaggtgtacggggcggcgaagcgataccagtactacgtgcgccacgaatcgcaatacgcgtaccatgccggcgctctcaactacgtacgatacaatccgaacgcaggctgcggcggcagcgacgtctacatcgagaacaaggcgaccgcgctgctgtacatctacacgccctaccagccgaacgaggccgcgctgaaggccggcgcaggcgaaggcgacgcgtgctcgacgtacggcaaccgcaatttcgcgatcatctacaattcgatgttcggcaatccacgagactgatatttcggaaaaattccggtagaatacctctaggaaggaatgaaccgaaggagcctcatgggcctgctcaacaatgacaactacatcgacccattcaagggagccgattacatcgaccccagcaaaaacgccgaaaaactatccagcaacgtggaccgcgagcatgcacaacgcgaagcatacgaacagcagcgctacgccaaacaacagcagacaccccaacgcacccccacacccccacaggagccccgtcacacaccacaacaggcgctcgtcaaccgacagacaccaatcagccgaacgacacgcacaagaaaatcaagaataccgataatcatcatcgccatcgcagtgctgacgatcatcgcgatgaacctcgtcggcacaatcgtcagccacggcggactggactcaatagcggacagacttgatccgaacaccgaaaaatatgagcagctctccgaacagaagaccatcaacgaaaccagcggcaatctgtactcatacggtgggatggcgctcaccgtcaccatcaagaacatggaagtcggaccaactgacatcaacggacagccgacggtgaaagtgacctatggatgcaggaatctgagccggcgcgcgatttaccccaacgccgtggccgattccatcgtcacacagaacggcatagagttacgaaaagcggtggtgacgggatacaacgggaatcttgatctggccagcaagaaaatcaaatcaggtgaaacatccgaaaaagtcagctatcatgtactttccgacatgcagactcccatcgccatgcaggtaagcaatttcagacacaagaatctggttcgttccgcgttcgccttcgatggcagcaacgagacactgaccagaatcgactattccgacgtgccggaagcaccgaaggtcgataaagcggcgttcgtcgaagacggacgcgttgaagaattgaacggtaccatacttcatttccgattggactctcttgagatacagcagaatgatgaagacgaaccacttatggtggcccgcatttcctggtaccttgagaacacttccacgtatgaaacattctcataccatgcgagcgtcaatgcacgacagggaaccgagacgcttgaccaggattatctgtacggcgacgactctagcttgattctcagagcccaagcggatgtgctggccacctctatctacgcttatgagctggatgatgagcggacctctgtgaagctcaccattgaaggcgatgacaccgtactgttcgagaaggatttcgaacccagcagtggcactgtggtgtagtcgacgcggcttccatctcaacaagaagcctaatcccagctccgcataaacgacaccgaaggggccgtcatctggaaatcaacccggatgacggccccttcgatgtcgtttatgcactaacctgcgattacgcaatcacagcttcggcagatacttcttcagctcaaacggggtgacctgcttgcggtactcatcccattcctgatgcttgttgcgcaggaagtattcgaacgcgtgctcgccgaggacgctcgcgacgaaatcggatttctccatgatcttcagcgcctcatcaagcgattccggcaacggctggatgcccatggcctgacgctcggcgtcggtgagctcccacacgtcgtcgctggtgggctcgcccagctgcatttgcttgtcgatgccgtcgagaccggctgcgagcagcacggaatacgcgaggtacggattggcgaccgggtcgagtgcgcggaattccatacgtgcggaattgcctttgccgggcttgtactgcgggatgcgcagcaacgcggagcgattgttgtggccccagcagatatagctcggcgcctcggcaccgccccacagcctcttgtaggagttgacgtactggtcggtgaccgcgcagatctcggccgcgtggtacaggatgccggccgcgaactgtcgtgcggtgacggacatgttgaattcctgcccggcctcgtagaacgcgttggcgtcaccttcgaacaggctcaagtgcgtgtgcatgccggagcccggagcgtcggcgagaggcttcggcatgaagctggcatggatgcctcgctccagcgaaatctccttgacgacggtgcggaaggtcatgatgttgtcggccgtggtgagcgcgtccgcatatcgcagatcgatctcgttctggcctggccccgcctcgtggtgcgagtactccaccgagatgcccatctgctcgagcatgttgacggtggcgcggcggaagtccatgccggggctgcgcggcacatggtcgaagtagccgccctcatcgatcggcttcggagtctgcgcccagtcatcctgcttttcaaacagatagaattcaatctccggatgcacgtagaaggtgaaacccttctccttggccttggccagcgcttgcttgagcacgtggcgcgggtcacccaaggacggctcaccatcaggcgtgagcacgtcgcagaacatgcgcgcggtgccctgcgggcctccgcgccacggaagaatctggaacgtcgacggatcgggcttgacgatcatatcgtcttcggacacgcgggtgaggccttccacggcggaaccgtcgaatccgagcccttcctcgaatgcggcttccagttccgccggcgcgatggccacggacttcagtgttcccaacacatccgtgaaccatagacgaatgaagcgcacgtcgcgttcctcgaccgtgcgcaaagcaaactcttgctgtttatccatagtgtccaatcgttccatgcgcatgttacgaacgtcgttaacacatgccgtgtcgcgacatgtcagcgtgcgacttcgagggcttcctccagcgtgaaggcgcgcgcgtacagcgatttgccgagaatcgcggcgtccacgcccagttcggcgagctccttgatgttgcgcaggtcgtcgagcttggagatgccaccggatgcggtgaccttcgcgtcggtgcgggacgccacttcgcgcagcagctcgatgttcgggccgctcatcatgccgtcgcgtgccacgtcggtgaccacgtaacgggagcagccgacggagtcgaggaacttcatggtctcgaacaggtcgccaccttccttcacccagccgcgggccgcgagggtgtggccgcgcacgtcaaggccgacggccacacggtcgccgtacttcttgatgacggaagcggtccagtcggggttctccagagccgcggtgccgatgttcacgcgggccgcgccggcttcgagcgccgcgtcgagcgaggcgtcgtcgcgcacgccgccggacatttcgatgttgaccttgtcgcccagttccttgacgatggcgcgcagctggtcacggttgttgccggtgccgaatgcggcgtcgagatcgacgaggtggatccattccgcacccgattccacccacgtgcgggcggcttccagcggggagccgtagtcggtttcggagccggattcgccttggcgcaggcgcacggccttgccatcacggacgtcgacggcgggaagcagcgtcaaagacatgtcatacctttcgttgcgttgaacggttttcggccgttcaacggatcttgcgattaccgatttgaatttacgattttgcgattgttgcgattgccttgcacgaatccgcgttcagaacgtcgcaacccagttacgcagcagctgcgcgccggcttcggcggatttctccggatggaactgcgtggcgaacaacggtccacgttcgtaggcggccacgaatcggctgcgcccgtaggtgcaccacgtcacatgctcttccgcatcgccgaagtccagctggtcggcggaggtgtcggcaggcgaagcgctcatcgcggcaaaggagtgcacgaaatagaatcgttcgttctccacgcccttgagcagcacggaaccttccggcgcttcgacggtgtcccaacccatgtgcggcaccacgtcggcgtcgagcagctcgacatcgcccttgatcagaccgagaccgggcgtgccgtcgccatgttccatgccacgttcgaacatgatctgctcgcccacgcagacgccgagcaccgggcggccggcgcgcagacggtctttgatgaccctgtctccgccgacgcttttcagtccttccatgcatgcgccgaacgcgcccacacccggcaccaccagtccgtcggcttccagagcctgacgatggtcggacgtgagggtcacgtcgaggtcgagattggccagcgcgcgcaccatggaacgcacgttgccgaaaccgtaatcgaacaccaccacggaagtcatgggcgctctccttcttttgcttgccgaagaatccatccttcggggaaaaacttattcgatgcttgacgaaccacgaccgaatcgcgtgtgctcggcgaggaccttcatggcgtcatcacgggtcaggcttgcggaatcgacggtttccacgccggaatcacgcaccccctgaacgtcggtgatgcccagcagcaggtcttcgacgaacggcgcggtggaggtgagcagcaccggtggcgcgaacgtctggccgaccttgccttgcaggtacatcgtcgcctcgagcttgtccgcacggttgatcgcgaggacggcaggcatgccggagaccacggtggtcagatctttgatggccgcttccgggccatcgccgtcgagattgcgtaatacagcgaccgcgccttgcggtgaggcgaggcattgcgcggagatgtcggacagttggcagaacgcggcgaacaggcgtgcggaggcaagtcgggtgatgatcaccgcgactttcgcacggttgcccagcagtccctgcaactcgtcgtcgaatgacagcgagttctcggcttcggacagtaccgcgtcggcttccttcgattgcaggccgtcctgcgattcgtcggaagacgcatcggaattaaccgtctcatccggctgatcgaatggcacctgcgcgggagcatcgttctgttgggcagcttcctcgtcctggaattccttttcgaagccggccatggccgcttccagctcctcttcgctgaaatgcatgccgtcgtcgttggtcttccccaagccgtcgaaaccgttcaaatcgtccttgtcgtcggacatcacagcgcgcccttcgtgctgggaatgccgtcgacgcgcggatcgggttcgatggcgaaacgcaatgcgcgggccaaagccttgaattcggcttcggcgatgtggtgcgggtcgcggccggaaatcacgtgcaggtgcaggcagatgccggcatgcatggcgatggattccatgacgtggcgaacgagcgaaccggtaaaatgcccgccaatcatgcagtattcgaagccttccggctctccggtgcacacgcagtacgggcggccggaaatgtcgacgacggctttggcgagtgcctcgtcgagcggcacggtggcgtcggcgaaacggcggatgccacgcttgtctccgagggcctgcttcagagcctcgccgaatacgatggcgatgtcttcgacggtgtggtgcgcgtcgatgtcggtgtccccggtggctttgattttcaggtcgatcagcgaatgcttgccgagcgccgtcatcatgtgattgtagaacggcacggatgtgtcgatgtcggttttgccggttccgtcgaggttgagactcagctccaccttggattcgctggtttcacgaacgatggttgcagtacgtgccatgttgcgactccttttgcgatgttgcagttgcgatattacagctacgatattgcgattgcggtggttgcgtcttccgcagccaccgcgattctgttctgtttcaagcttattgccggatactgtcacgaacttccgttccggacagtatcccagcttgcgttccggcttgttcagccctgttccacgatgcgcagcacttcgaccaacgcctcacggaaccgtgccatttcctcgtcggtgcccatgcacactcgcatccagccttccggaccgacgacgcggatgagcacgccgcgcttcaacagttcgtcgaagatgcggtcgcggtcgtcgaaatggccgccgaagagaatgaagttcgactgggtttcggccacttcgagcggctggcccttgtaggtctgctccttgagccatgcggaggtggcgttgcgggtttcgcgcaggtgcgccacgcggctcagctgttcatcggtgtgttcgaacgcggcgagggcggcggcctgggtgacggcggacaggtggtacggcatgcgcacgatgcgcacgcagtcgatgatgcccttgttggcggccaggtagccgacgcgtgcgccggcgaaggcaaacgccttgctcatggtgcggctgacggcgaggttttcgtattcgccgatgagttccagcgcggtgggcgtgcccggatctcggaattcgatgtacgcctcgtccaccacgaccaccggatgcacgccttcggcggcgcctgccacttcggcggtacgggcggcttcgagcacgcgcttcagatcttccggcttgagcggggtgccggtcggattgttcgggctggtgagcacgatcatggccggcttgacgtcttcgatcgccttgatggtggcgtccacgtcaagcgtgaagtcggcgttgcggtgcgcaagcttccacgtggtgaacgtgtcgcgcgcgtattccggatacatggagtacgtcggatcgcagccgagcgcgatgcggccagggccgccgaacgcctggaacagctgcagcatgatctcgttggagccgttggcgccccacaactggtcgacgctgagcttcacgcccgattcgcgttccagatatgtggagaacgccttgcgcagttcgatgtgctcgcggtccggataacggttgagcgtcggggcgatctccttgacacgctgggcgatggtttccaccacggccggttcgggcgcgtacggattctcgttgacgttgaggcacaccggcacgtcgagctgcggcgcgccgtacggttcttcgccgatcaggtcgttgcgcagcggcagatatgccggaatcgcgttgctggaagtctcgctcatcggaggccggcctgctcttcctgttccttgatggtcgccttgttgtacgggtcgtcgatgaagcggctcagcacgcattcgccgtgtgccggcagatcttcggagacggcgaaggcgttcacacgggcggcgagggtcttcaatccctgctcgtcgtattcgatgacttcgaccggcttcatgaaggtgtgcacgccgaggccggcggcgaagcgcgcggtgccggaggtcggcagcacgtggttggaaccggacatgtagtcgcccagcggaaccggggagtacgggccacggaagatggcgccggcgttgcggatcttggcgatcacggcatccggatcagcggtctgcacttcaaggtgttcggccgcgtacgcgttggccgcgtcgatggactgttcgatgccgtctgtgaggatgatgccggactggcggccgcgcagcgacgtgttgacgcgctcggcgtgctcggtgcgaggcacgcggtacttgaggctctcctgcaccttgtcggcgatgtcttcgctgtcggtgataagcacggaaccggcgagctcgtcatgttcggcctggccgatcagatcggcggcgagccagcttgggttggcgcccttgtcggcgatgatggcgatttcggtcggaccggcgacggcgtcgatgccgacgatgccggagaccatgcgcttggcggtggcgacgaagatgttgcccgggccggtgatcttgtccaccggatcgcacagaatctcgccgtcctgcggttcggagcccttggcgccgtatgcgaacatggcgatggcctgagcgccgccgaccgcgtacacctcgtccacgccgaggatggcgcaggtggcgaggatggtcttgtccggcaggccgtcggagttgctgcggctcggcggggtggcgatggccagcgattcgacgcctgcggcctgcgccggcaccacgttcatgatgacggagctcgggtagacggccttgcctcccggcacgtacaggccgacgcgctgcaccggaatccaacgttcggcgacgcgcgcgccttcggccagatcggtgtggaacggggccggcacctgggatgcggatacggcgcggcagcggcgcacggattcctcgatggcggcgcgcacttccggatcgagctcgtcgacggcggccttcatggcctcgaccggcacacgcagatgctcgggacggatatggtcgaacttctccgcgaagtcgcgcagggccgcagcgccgcgggccttcacatcatcgagaatcggctgtacgagctcagtggcctcgttggtgcccatctcggcgcggggcatggcttccagcatttcagctcgggtcagcttcttgccgcgcaggtcaatgattcgcatatagttttcttcgctcataacgccccatggtaacaacgccaagtcacgagaacgtcccgtcgtctcacattcagccgcattgtgagacacgcagatccaccgttttccatgccatgccgatttccgcgaaaaatatatgccggtcgacgccattcagcatcggccggcaatcaaaaacctgttcaggtcaaaccgttcaagtcaaaccgctcaggccaacggaagcgagctcggtccgaagagaatcttgatttcggcgaacagcgacgtgtcgcgtttgacgcggaaccggtctccgaacgtcagcaccttggcgttgcctttgtcgtccatcaacgccagtttcacctcgcacgggccgggatggctggtcagaatctgcccgagccgccgcacatgcgactggtcgagcgcgatcggcggcagcacaatcgtcagcggacgttcatcctgcgcctccaacgtcggcacggtgaattcggtggcgcgcatgctcactgtctcatcgcgcttctccacctggccgcggatctgtaccacggtgtcgacggcgagctcgggcgcggcggcctcgtacaccttgccgaagaacatgcattggatggaactttccagatcctcgacggttacgatggcccacggattgccctttttcgacacgcggcggtccacgttcgtgatcaggcccgcgatcgtcacctgctggccgtccggcatgcttcccgcgcggtcgatcaggtgcgctatcgacatttcgcgcaacgacaccagaatcgactgcatgccgctcaacggatggtcggacacgtacaggccaagcatctcacgttcgaagttgagcttggttttcttgtcccactcctccacgtcgggcacctgcaccatggcgtctcccatggcggaatcgttctctttggaatcgtccaggtcggcgaacaggtcgaactggccttccgcctgcttgcgtttcaggccgacgaccgaattgatggccgtttcgtggatggtgaacagcgcacgacggttcgggtcgatcgagtcgaacgcgccggccttgatcagcgattccaccaatcgcctgttcagcgcctccaacggcacgcgtttgatgaaatcggtgaagttcacgtacttgccgtggccgttctcacgttccgcgatgatcgcatcgaccgcgttcttgccgacgttgcggatggcgccgaggccgaatcgcacgacgtcgccgactgccgaatactcgtacaccgactcgttcacgtccggagaaagcacctggatgcccatgcgtcgcgcctcgcccaggtacagcgcggtcttgtctttgttcgtgctggcgccttgcagcagggcggccatgaactccaccggataatgcgttttcagatacgcggtccagtaggagatcaaaccgtatgcggccgaatgcgccttgttgaacgcgtagccggagaacggtacgaggatgtcccacacggcctgcgcggcctcttcggaatatccatgctccttcatgccggcgaagaacggaatcttctccttggccagcacttccggcttcttcttgcccatcgctcgacgcagcacgtctgccttgcccagcgaatagccggcgaggattcgcgccgcggactgcacctgctcctggtagacgatcagaccgtaggtctcgtcgagcacttccttaagcggttcggccacttcggggtggattggcgtgatcttctgcagaccgttcttgcgcttcgcatagttggtgtgcgaatccatatccatcggacctggacggtacagcgcgatcagtgcggaaatatcgttgaagttgttcggcttcaacgttttcagcagcgagcgcatgccgtcggaatcgagctggaacacgccgagcgtgtcgccacgggacagcaggtcgtaggtggggcggtcgtccagcggaatcttcgtatggtcgatgcgttccttgccgttcgcctcgatgttgttcagggtgtctcggatcaccgtcaagttggaaagtccgaggaagtccatcttgaccagaccgagcgtttcgcacgtatggtattcgagcgtggtggtgacggtgccgtcggtacgttccagcagcggcgacgtgttggtgatcggctcgctgcccatgatggtggcgcaggcgtgcacaccggtctgacgaatcagaccttcgatgcccatcgcctcgtccgtgatgcgtttcgcgtccgggtcggaatcgtacagttcgcggaattcgcgtgcttccgcgtatcgtttcgcgcttgggtcgaagatgtcgtgcagcggaatgtccttgccgccggtctgtgcgggaggcagggctttggtgatcttgtctccgacggagaagtcgtatcccatgatgcgggcggagtccttcagcgcctgcttggttttgatggtgccgtagatcacgcactgcgccactttgtcacgtccgtatttctcacccacgtagtcgagcacgcgtccacgaccgtccgggtcgaagtcgacgtcgatatcaggcagtgagacacgttccggattgaggaatcgttcgaagatcagaccgtgttcaagcggatcaagttcggtgatgcccatcgcatacgcgaccatggcgcctgcggcggagccacggcccggccccaccatcacgccgtgggccttcgcccagttgatgtagtcggccacgacgaggaagtagccgcagaactgcatctggcagatcacgccgcattcgtagtcggcctgccgcagcacttcgagcgacggcttgccgttgtaccggcgttccaggccttcctcgaccttcttcaggaacagcgacgtctcgtcccagccttccggacagtcgaattgcggcatgaacgcgccgtcttcatgatcgtcgaacatgacgttgcagcgttcggcgatctccaacgtgttgtcgcacgcttcgggaaggtctttgaacagttcgcgcatttcctcggcggatttgatgtagtagccggtgccgtcgaatttgaatcggcccggctcgtccagcgtggagccggagttgatgcacagcatggcgtcctgcgcgccggcgtcttcggcacgcgtgtaatgggaatcgttggtggccagcagcggcgcgttgagcttttttgcgatgtcgagcagcccgtcggtcacttgcttttcgattttcaggccgtggtccatgaattcgatgtagaaattatcgcggccgaaaatgtcttggaattcgccggcggcacgcaacgcgtcatcgaactggcccaggcgcagacgagtctggatgatgcccgacgggcagccggacgaggcgatgatgcctttcgaatatttggcgaggatttccttatccatacgcggatagcgcatgactcggccttcaaggttcgcgtcggtggaggctttcatgaggttgacgaggccttcgtcgttttctgcccacatggtcaggtgggtgatgacaccgccgccggacacatcatccgggttacggcggcgatgcagcggatccagatccggattccagttggtgtcccagctcacacgggtggggtcctgacgtgcggtttccggcgtcacataggcttcgatgccgatgatcggcttgatgccggcgttgaccgcggcgctccacatctcatacgcgccatgcatgttgccgtggtcggtgatgccgacggccggcatgcccagttccttggcgcgcttgaccagatccggtattttcgatgcgccgtcgagcagcgaataatgcgtgtgattatgcagttgcacgaaatttgcggaagtagccatgcgttccaatttagctgggcttcatgacggcgtggagtcgtttctggccgtccggccacacttttatagggactggtcggcgtgccgtgcgcgcatcacgtcaagcgcatgctgcaggtcggcgggatagtgcgatttcaccgtggtccacacgtgcgtacgcggatggcggaattccaattgcatggcgtgcagccattgccgttcaaggccaagcgcctcgctcagctgcggattcgcgccgtacatggcgtcccccgccaacggatgcccgatggatgagagatgcacgcggatctgatgggtgcggccggtttccaggttcacggatacgagcgtggcttcgccgaaacgttccatcacgtcccaatgcgtgatggcctctttgccggccggtgtcacgcagaagcggaagtcggagactttggcgcgtccgatcggcgcttcgatggtggctttgtcttctttgagattgccctgcacgagtgcgtgatatgttttgacgacctcatgttcggcgaactgccggcgcatctccacgtacgcaagatcggacttgcatacgagcatcagtcccgatgtgcccacgtcgagtcgtgacacgatgccttgacggcctgccgcgccatatgacgtgatgtgcactcccctgtcgatcaggctgccaagcaccgtcggaccggtccatccgacggatgcgtgcgcggcgacgccgaccggcttgtccaccacgaccacatcgtcgtcctcatagacgacggccatgtcatgggcgatcggttccggttcggaccgttcctcgacgatgtcgaattctacggtttcgcctgcctgcagggtcgacgatttggaaatgtccctgccgagcacgcgcgcctgtccgctttcgatgaggtcggccgccttggcccgggaaatgccaagcattttggcgaccgcgacgtcgaatcgtttgccgacgagcgcgtcgggagcgggtacgagacggctcatgctgctttcgccccgtcgtcggttgcgttcgcatcatcaccaagcgtcttgccgttggcctcgtcaaggtccttttggctgaacggttccccgaggaacagcagcagcaccgccgcaacgcccgcgagcatgaggaagatgtccgccacgttgccgatggaccatccgtagttcaggaaatccacgaccttgccgttgaggaacccttccgcgtagatgacgcggtcgatgaggttgccgaacgctcctgcgaaggcgaaggcgaacagcaccgtccatttcatggaaatggtgcggacggcaagtacgaccaacgccacgcaggccgccatcgccagcagggaaatcagccacgtcatgccggagcccatgccgagcgaggcgcctggattacgcaccaatgtcaacgaaagcaggccgggaatcacgcgtatggtacggccatcggccaatgcggacaaagcccacatcttggtgagctggtcaatcgcgatcgtcgcgatcgcaatacacgcaaagacggccacgcggtcgcgcagccgtctttgatcattcttcatgatgtcagacacaggctaatctcagtcgttgttgtcctgagggtcctggtcgtagttgttcgtatcggacacctggttgacgagctggccgaggaagtcggtgagtcgtgcacggtattcggtttcgaactgcttgaggcccttgatgttgccttcgatgaccttggtctgggtctcgaggttgtcgcggacctgctgggcgtagtcgtcggcagcggtacgggtcttcgaatcgtagtcgaaggcgcgcttctgcacttcggcttcgtagttgtcggcctcggtgtgcttgtcggagaagtacgtgtcggcgtcctgggtcttctgagccaggtagccgtcgccctcttcctgcttctgcgcgaagtaggcgtcgccttcctgctgcttctgctccagataagcgtcgccatcctgggtcttgccggccagataggcattgccttcctcggtcttctgcgcaaggtaggcgtcgccctcctcggtcttctggttcaggtacgcatcgccatcctgctgcttctgtgccagataggcatcgccatcctgggtcttgccggacaggtagttgtcggcgttggcgcgggtgtcggtggagtactggtcagcctcggaacgagtgcggttggagtagtcgttggcgctgccgatgatctcttcgtacttgcgctggctttcctcggtgatctccttggccttggccttgcccttgtcgacgtactggtcgtgcagctgcatggccagcgtcagcatggcggtggcgcgctccggctcggtattggcgcttgccgcggcacctgcgatcttctgcaggctgccggtttcggtgctcggctcggacttggcgacctgttcgcgcagctgtgcctcgcgaatctgggaatccttcagttgctgggcaagctgctggatctgcatggcctgctgcttcacctgggcatcctgctgctgggactgggcagcatgctcctgagtgagctgctgggcctgagcgacctggtcctgcgcttcctgaagctttgcggtgagctgatcgatctgctccttctgacgctgagccacgaccacctgctcctgggccgatgccagctgacgggacaggtcctcggtctgtgcgcggaacgtgtcacgctcgtgctgcacggcggtaagctgctcgccaaggtcggcctgaccggccgcttcggctgcctgggcggtgagctgatcgacctgcgcggacagacgatcgatctgccccttgagctgctcgttctgggaagacagcgcacgattgctttcctctgcctcggaaagcttggcggccgcggcctgagcggcctgagcggcctggtctcccgcaccagctgcctgctcggaggcggacttcagcgtcgcgttctcctgctgcagggactggatctgagcattcaactcggaaatcttggaattgagtcctgcgacatccgggccaagagactgcgtggcctgtccgccggcaactgcctgcttgccaagggcttccaccgtctcggttacctgatcgaggaagtcatcgacttcatcgacgtcatagccttccttgaaccttacggtctggaaagtatgctccctaatatctttcggcgtcaacagagccataaatccttacacctcgctttgggcttgatgccttactgttgttgctttcagtgttcgactctagcacgaaaccatagatattttgcggaaaaacggttttttagaggtgctaaataaggaaatcaatgaccacaagaacgaaataaagcacaagatacgcgacgtcaaaatagatcggtccgagcggaacgggacgaatatactgccgcaaccaccttaacggcggctccgtcagctggtagatggcgtcgaacaacgaggccacgattccgcttggccgccacgtcggcgacaatgccaacacccagtcgagaatcatgcggacgaacagcaccaggatataggcgttgaccagaaaatggacgacgctaccaattatcgagagaatcacgttgccactgtatcaagcgcgcataacaaaatgcccccgctttcagtgggggcataatcgtctgatttgtgcttgctctgtgctacacggctcagtcggcgaacaggtcgtgggccggacccttgtcttcaggctcctcgaccttgatgttcacttgggccgggctcagcaggaacacgcgcggagtgacgcgttcgatggagccgcgcacgccgaacaccacaccggcggagaagtcgacgatgcggtatgccacggcttcggccacacctgtcaggttcagcaccaccggaatgccgtcacgaatggcgcgaccgaccatctgcgcatcgtcataggtcttcggatggatggtggtgatgcggctaactctacccccctggaacgggttggactgctcacgcggagcggacggcgtggaagcggaagccgaagaggaaggcatcggggtgacggaatgatccgaatcgaacgaggtctcgccggtgtcgacgtcatcctcgaaatcatcctcaccctcggcgacgtcggacattcccaagtacgacatcgcgttcttcatgaaacctgccatgtatgttcctttcgcgtctacgcgttgactttagcgcaggaaatccggaatatcgaggtcgcccggatcgttagccgaaaccacttcatgctcggtggtctggtcgaacgaggcgacgttctggtccggagtggacggaatgtagctggacagcggctgcacctgcggcaccgccggagtctgcaccggctgcggctgctgggcgggagcctgcacgccggcggacaacgcggacagcggtaccgtgttttccttggccgcggccggcttttcttcggccggctggtcgggcttcttagaattggcatcgaaacctgccgcgatgacggtgacacgcacctcgtcgccgtaggcgtcgtccagggacaggccccagatgatctgcgcttccggatggatggccttctgcaccagcgcgaccgcggctgcggcttcctgcagcttcaggtcggtcggaccggcgatgttgatcagtgcgccatgcgcaccctcgatgctttcctccagcagcggcgagctgatggcgatttccgcggcctgcgtggcgcggtcctctccccgagcggaaccgatgccgaacagcgcggtgccggcaccacgcagaatcgcgttgacatcgttgaaatcaacgtggatgtacgaattcgaggtaatcaggtcggtgatgccctgcacgccggccagcagtgcggtgtcggcggtcttgaacgcgtcgacgatgccaatggtgcggtcggacagttccagcagtcggtcgttcggaatgacgatcagcgcgtcgacttccttgcgcaggttctcgatgccgagcgcggcggaagcggaacgctgcggaccttcgaagctgaacggacgggtcaccacggcgatggtcagcgcgccctgctggtgggccgcacgtgccacgatcgggctggcaccggttccggtgccaccgccctcaccgcaggtgacgaacaccatgtcggagcccttaagcgcctcttcgatgtcggactggtgatcctgcgccgccttggcacccttttccgggtcggcgccagcgcccagaccacggctggaggcatcgttcagcgagatcttgacatcggcgtcggatcgcagcagatcctttgcatcagtgttgatcgcaataaattcgacgctttgaagaccctccgcaatcatgcgattgacagcgttgcctccggctccaccgacaccgacgaccttgatgttggtcttgtcgttgaaattgtcagtctgggcaatctcgctcaccattgtctcctgttcactcacgtatatgaacaactctatcgcaatcgcgccgatgatacgcgcacttttccaggcgtgtaccaccgttttttcacttttttgctgtcagcatgttcattctgcctgcgttgaccccttcagtcatttgtacacggctcttcgaacatgcgtgacgggctttagtagctggcatccatcgggtcatccccgaacagcgcctcacgctcctcgtgcgtggtttcccgggattccaaccatccgtaaggcagatgcacctttttggcgaagcgcacgcgcccccttggcttgtcggcgatgcgttctgggaaccgaatgttcgggtcgagtctgcctatctcgcgccggacatcctcaagattttcacattccatgaacgcacggcgtgtggaaccgcccacggggaagcccttcagataccatgcgacgtgcttgcgcaggtcatgtacggccatccgctcgtcgccatcatagaattcggtcagcagttcggcatgccgttcgatcacgcggcacacgtcgcccagcgtggggtcgacgcgctcgtcactgccggcgaacgcgttcttgatgtcggcgaacaaccatggacggccttggcagccgcggccgatcgcaacacccgcgcaaccggtttcggtgaccatcgccaacgcgtcgttggcaccccaaatatccccgttgccgaagacgggaatatcaagctcggaaaccagctcgccgatgcgggaccaatcggaatgcccaccgtaatattcggcggtggtgcgcgcgtgcagggtgacggccttgcagccttcctcctgcgcgatgtgcccggcttcgaggaacgtctcgtgttcatggtcgatgccgacgcggattttggccgtgactggtacgttggccgcgtcgcacaccttgaccacacgttggatgatctcacggaacaggtccgtcttccatggcagcgcggaaccgccaccacgacgcgtcaccttgggcaccgggcagccgaagttgaggtcgacatggtcggccatgttctcgtcgatgacgattttcgcggcctgctccacaatcgagggattgacgccgtacagctgcagcgagcgaatcttctcgctgggtgcgaaacggcataggcgcagggctttcggattgcgggccaccaatgcgcgcgcagtgatcatttccgccacgtacagaccgtcgggaccgtagctttcgcagatcacgcggaacggccagttggtgacgcccgccataggcgaaagcaccaccggcgtttcgacgtgcaccggacccaaatcaacggactttataacgggaggaaccgacggccgttccgcgtcggtacgcgggtcgagcacgtcggattcctcgtaggcattcacaatgctatctggcataggtcagacttgttccgttcaatatgaccgattcgtggcgatcagtacaggccaccggcttcggcgatcttgacggactcaggccaagcctcgccacccatttcgaccggcatctgcggcacgctgacgcgcttctcgccgatacgctcggcgatgtagtcggccaccttgtcgaggctgacgcgctcctgctgcatggtatcgcgttcacggatggtgacggcctggtcgtcgagggtgtcgaagtcgacggtgacgcacagcggggtgccgatctcgtcttcacgacggtaacgacggccgatcgcgccggcctcgtcgtagtcgatcatccactcgttctggcgcaggtcggcggcgagcttctgcgccacgttctgcagatcgggcttcttgctcaacggcagcacggcggccttgaccggagccagacgcgggtcgaggtgcaggacggtgcgcttgtccacaccgcccttggtgttcggagcctcgtcaacgtcgtaggcgtcgacgaggaagcacatgagggaacgggtcaggccggcggccggctcaatgacgtacggcacgtacttttcgccggtggcctggttgaagtagctcaggtcctcgccggagtgctccgcgtgcgcggacaggtcgaagtcggtacggttggcgatgccttcgagctcgccccaatcggagccctggaagccgaacttgtattcgatgtcgacggtgcgcttcgaatagtgggccagcttctccttcggatgctcgtagtggcgcaggttctccggcttgacgccgaggtcgaggtaccactgggtacgggcgtcgatccagtactggtgccaggcttcgtcctcgccgggcttgacgaagaattccatttccatctgctcgaactcacgggtacggaagatgaagttgcccggggtgatctcgttacggaaggacttgcccatgttggcgatgccgaacggcggcttcttgcgggaagaggtcatcacgttcttgaagtccacgaagatgccctgcgcggtttccggacgcaggtagtgcagggagttctcgtcctcgaccgggccgaggtgggtgcgcagcatcatgttgaagtcgcgcggttcggtccacttgccgcgggtgccgcagtcggggcacacgatgtcggccatgccgttctccggcagcttgtctccatgcttctcggcgtaggattcctcaagcttgtcggaacgctggcgcttatggcagttgaggcactcgaccagcggatcgttgaagacggccacgtggccggaagccacccacacgggggtcggcaggatgatggaggtgtccacgcccaccacgtcgccacgggtgacgaccatggagcgccaccattcgcgcttgatattgtccttcagcgccacgccgagcggaccgtaatcccatgcggaacgggttccgccgtagatttcaccggcgggaaaaacaaagccacgacgcttggcaagggatacgacttcatcgagtttggatacagccacaatgcaccttctggattgaatggtttggggtctttacaagcgcaaagcctaccgtcacatgctgacagttttgcctgacagtttcacggcatggcaagttacgtgatttccgatggggatgaacggcaaattgatgcaagaaccgaatgaaaacacataagaatatgtgaagatacataaggggcttcccgcgaatgcggaaggccccatgtaatggataaggagagaatcgttctttatgtattgtttgtcactgcttggtaacgttctcgtcttcgacggtgtcattgttaagcagcagcgaccagattttacaattgatggtcacgttgttcttggtggcgtcgccgcccttatcaagggtgtacgtcacatcttcaggaacggcaatacggttgatgccctgcacggcctgaacgaagccacgcattgcatcatagctgccattcgcagtaatgctcaccggaacctgcacaagccggccggctttgatggttccctgcatttcggacggcacttcagcggtggtggcctcatcgaaggtcacagactggatggagacgcccgcaccatcagcagcggcattcaacgaatcgatgaattcgttttggttatagccgtcaggaatctggcgctgcagctgacgcaaacgatccttctgcaggccgatcgtctcgctcgccatacgcagcgtttcaatctggtcacgcgttttcttgttgctttcttcgatctgcgcagtctgcgcgtcggcttccttaatgtgtgtaagacgcggagatacgcctacaagccatgtcaacatcagcaccactacgatgccgacggccagtgcgatccatgcgattttatgcttgttcatgtttcctcctgcttatcagttggacgatccgctggcatcggatgaggtgtcagtcgactggttggcagaagcatcagactgtccggacgcagccttgtcgaggcttgcgcgcagcttggcgagcaaatcacggttggcctgggtcgcgcctgctgagttgtcgcttcgcgaagtggtgttgccgtccatcaccagtgaaatcgttccggtatacgtgtaggtggtgccaccttcactgtcattcttggtaatagagctcacataacccgtcttgtacgtggggatcgaggcgaaattgttgataaagtccttggccgagtagaaattcggcgattcgatggtgaagtccgcggaaatcacgccgttaccagaccacacagtggacgtattgtcggaggatgaggacgaattgttcgatgaagcgatctggaagcttttgagttccagattcgtatactggccgccttccggaagcgagctgttcagcgaatcggcgaccttcatccagtccatttcgtcatacagcatggcaatcttcgccttctgcgcatcgtccagcgaattcaacgtgtcttcgacatccttgaactgcgctttctccttttgcagggaaatggtcttctgttgagccacttccacacgatggtccgcccatgtggattgggcgaacatgaacacgctgaccaccaaagatacaatgagcacgccgatcagcacatacgttaacaggtatttgatggctcgatcgcgattcaatccgacgatggaacgcggaatcaggttagcgcgcatggtccagtcggctgggttttccggcgcggtgctacgcttgccgataccgcccgccttcaacgcattgctgatatcggagacgttcatggatagcagggtgcccttctgaccgtccgaagtgtccggataggcgatttccttgccacgtccacggtgggagttggccttgtttttcttggatttcatatcaagtttcataatcacactcacctcggcttctttccgatgaccagtcccagcaccccacctaaatcgaccgcgtgcgccacaatgttctgacgttcgacttccttggacagcttgaagcggatgaacggatcgccaatgcgcaccatcttgttgatggagcttgccaacactgggggcagaccaatgagtcgcgcacccgtaccggtgaggatgatgccgctgatggtgctgtccgcatggtcgacgtcgtacatgttcaacgtattgcgaataccgacgatgagctgcgccgtggtttcacgaatgacttcctcggctttttcgagacgttcgtcaccggtcacattttgcagaccaatctggtttttgatgcgttccgcgtcttcgaaggagatgctcagcgcattggcgatggcgtcggacacgtcgtcggtaccggacggcacgacgcgcatataggcgggttttccgttattgagcacgatcacgtcggtgcagttgccgttgatgttgaccaccgcttcggtctgcgcctggttggtgtcgctgaacaggcgggccaacgcgaacggaccggcgtcgatggaggtgatcacgaaacccgcttcttctgcggtatacgcagttttttccagaccaccgcgcagagtggctacgagaatgccatgaagctgcttgccgttctgctcgtcatccactacagacaacggcacgaagtcaagttcggattcctcaatgggcaatggaatcatgcctttggcctggaatggcagggttgagcgtaaatcagctagggacatgtaggggaagtccgcctcacggaacaccatacgacggctcgaataaacgagtatggtgttctcacgcgggaacttgaagcgttgcaccaacgttttcagtagaccggtgaccacttcggcgtccaccacttcgccatccaccacagctccaacgggcagcggaagcgcctggaagtgtttgatggtcggcgaatccgtataggggtcggctatgaccgccgctcgtatggcgtcgctcgcaatcgacagcgccgttattgctctcatggtctctccttatatatatgggtcttgtatgcggatgcgttacgcaagtccggtgagctgcaggtatagtgtggcgattggtacgccggcgaaaatgccaagccatgcgccgagcagcatggatggcccgaaggggatgcctccatgaaggtcgacctttttgctggccagcaataccaagctgatggcaccgccgatgaagaacgcggcgaacgatccaatgatgaattgcggccagccaagccagccaagcagcaatccgagaatgaacgcgagtttgatgtcgccgtctcccataccacctttccagatgagtgagagtatgaaatagaacacgaagagaatcagcgcgcagagcgctccgcgaccaagacgagtccactcgcctatgccaaacgatgccacaaccagcagcaacaccgttgcgataagcgtcggcagtagcactacgttgaggatgagatggtggtccaagtcgatgaacgctatgacgatggacacgcatgcgaacacgtacagcacgggtagtgcccacaacgggtatgcgccgaacattccacctgcggttacggcaaggaaggacagtccgccaagcgattcgaccagcggatatcgtgcggcaatcggttccttgcagtgtcggcatttcgcgccgagtgccaaccaggaaaagatgggaatattgtcataccaagcgattggcgcttcgcatttcggacaaaagctacgtttcggattggtgatgcttatgtggttcggcacacgccatatcactacattcaggaaagatccgaagatacagccgatgatcagcgaggccaccagcagtatcaccacggtaggaacatcattcactatatccatgccgttcaccactttctggatgtgacggtggagtccacaaccgctgagaaataggtactggtagggatagatacggtggtcgtcgtcgttgtccaagtaatgctaccggccgatccggcatcaccataattcactgaagcgttccatgcctgcgatttcaccagtcgcccacgcacgtcacgatcggttccgcatgaaaccattttcagcatggaatgaccgtctgagcgattgtattgacggtctttcttcccattgctttccacatagtctcccggatagatttccgtcaggcacatgccttcgctggtttggaaagtgccagcccatggatactgcgtcttgccgccgtaactcaccgctttcgaggtgttgtgctcgttgtatcggcggaactttgtggcgtcacttggattgtcggtcaacgacaccttactgccggaaacatgcaggtacttcgcgttgccgttggtgtcgtgcagggctatggtggtgtcgatgccagtgccatcggcgctggcatcttcggtataggagacgcggtcggatgtgaagttgaagttctccttgtcggcggccgaacagtgagaggtcgagatgaaatcgctgccttgccctatgatcgtcttctggtaacatttcgcgtcgaagtccgcactatgcacgtcgcaggtgtcggcgtatacgtcgttgccgtccatcaccatgcagaatccggatgcggagttcaccatctgattggtgccgtatcccgcttcgcctgcttggctgaaggatgcggtggcatcctgcatgtcggcaccgttcgaaaagtaggaatcgctgaagttataggtccattgcgacaccatatacgcctgactgtagggggtggctttgatattgccgcccgcaaaatgcggatcgccactgtcttgtgggctaccgccgtaatgggtgacttccagacgttggaacttggtctttttgccgctctgcacgccggctacggcatatcccttgctttcaggcagagcggaatcatatgacgctgcttgcgcactgacatcgcccgtcagctcgttccagtatccggcgttgatgaacccgttgtagaagttccatttctggtatttgttgagcagactgttcgggtcgttcttctccgtctgctgcgcaaccttattcggatccgtataataatcgccttggaagtggactccgtatgatgtgccgcatggctgcaaggtggctggagtcttgccgtcggtgtcatcgatgctcacgccggtgacgcacaatcccatattcgaggccagacggatggaattgtccttgtagtacacccacgtgttcaatgaggagtacgcaccgtcagcacggcattcctccgtatattggtaggtgtcacctcccgcgttgtatgcggcgggcaataccaccagcccagaaccggcttgaggcgatttgcttaaatcgaggttctcggcaatgcttttcttctcgttggtaaccggaatggtggtggccagcatgcaggtgcggttcactggattcaacgtcgcagtgccatcggacagctggctggtattggtgtgtccggaatccaccgtgccggagaatttaacttcgccggttggatcggatccgatggacacgccatcataatccacgggtacccatacgaactgcgaatcgagcctgttgtagggcgccgcggcataaaaacccatgcccatgcggccaccgacgcccagggtgctggaatggttcgtggtggtggagtccgttttggcttcgatcctgcataccgcacgcttcatggcctgcgggcttttggtgttgcctgctgtacggccgtccttataccggttgatgaagcccgtggccaccacttcggcatactgtaggtttttcagatcggatggagagccgatcatctccgccgatgcgtcatccggattggcgtcgtagaaattgatgcgcacacgataggacaggtcatctggcgtatatgaagccgtatccgatgtttttaccgtcttattcaaagcaacatgattcaacaatacggatgcgccatcatatttggcaaattcaccatccttggaactgtcgttcatatcagcatcaacggcaggcaacaccttctgtaaatcatcaagactcgtagaaccttgcaacttcgccagattttcattgatatagctcaagccgacttcaaggccggattcggccgcatagttggcttgggagttttccttattgttcttgtaaggaatcgcctgggcaagcagggtagtcatgaccagagcggatgtggtgagcaccaccatcacgaacagaatggccagcatcatggcggcgccgtgctcccccatgcgttcgcgtaatgccgcacggtacctgcggttgagtctggaccacaatccggtctgtttcatgcttgctcctatatataaaggtatgtttcgctcgggtactcggatatcaggtcaggcctgaccattgatggcgtcgaacatggagaacatcggcatatacaatgccaccaccatgaagccgaccaccacgccgaggaacagaatcatcagtggttccagcaacgaggtgagctgtttggccatggattgggcctcttcgtcatacgctcggcccgcgctggacagcattttgtcgatggcgccggagtcctcgccgatggacaccatctgcaccagcatgttcgggaagatcttttcggtgctcatgctgtcggccagacggtagccacgttccaccaaacggcccacacgcttcgaagacgaatcgatcacatagttgcccgaagtcgatccgacgatatcaagtgcctggagaattggcacaccggaagcgagcatggaagagaaattattgcagaagcgggccagggccacgttggtgtccagcttgccgaacaccggtgccttgagtgtgaacggatcccaccaggtgcggatgatgtctttgttacggttgcgcttccagaacatggccagcgccacgacggccacgatcagcatcggaagcacgtagggcatcactttgccgaggtccaccaggatctgggtcacgaatggcaactgggcattcatggaatcgtacatgctggcgaacatcggcacgatggtgagcagcatcaccatcaccaagatcagggcgatgcccagtaccacgaccggataggccatggcgcttttgatctgcccttggagcctcacatccgcttcgaagctgtccgccacggtgagcagcgatttgtctaggaagccgccggtctcgccggcacgaaccatgttgaccatgatcggcgggaacagggaatcgggatccgccgacatggcttcggagaaggacgagccgccttccacttgcgccacgcaggcctgcactgccttgcggagtttcacgttctcgatttgttcggtgacgatgttcaaggctcggatcagcgagacgccagccgccaccatggtggcgagctgccgcgccgttacggcgaagtcttttttgcttggatatttctcgaacgccttgatgttgatttcagtgttgagaccggtgccggcggccgtgtcggtcaggtcggtcggatacagtccaagttttttgatgcgctcgatggcctggtcgcgcgtctgcgcttcgaccacgcctttctctttacgctggccgtcgaacgagacgcccttgtaacgccactgcctggtgccgttatccattgaaacctgcgcgtcgttgccggccatactttcccccaaagaatcaaatgatgttcgattgtgtttgattacggttgatacaagaatgtcggggacatacagggtccccgacatccgattcgactggaagagactacttcttgtccacagcagtcatcttgcccgtcgatgaatcataggtgtagaccttggttccgctgttctcattcgtgcccttgatagtgtaagtgttgtccttagatgtgaactcgagctttacaccatcagtcacagtcactttgtttccgctgatatcacatccagtggagccacaggtggcaggtaatgtcggaatcttgccgttattgctggtggtagcggtctcaaccacgaggctcgcgttcttcacatccgactcggtctgggaattccatgcggacttgcgctggttcaggtaaactgggacggccactgcggcaaggatgccgatgatgatgacgaccacgagcagttcgacgagggtgaagcccttttcgcccttggcacggcggttgagtgcgttacgtacgctcttcataatgaacccttctttccaattggaaggacataccgtgggaccgtccaacttcggatggtccacagcgattcttctttgcgttatttccccttgtgggggtggctggctcacataaccaacaactctcagcgtagtcgtattgacatcgtttgcagtaccagatgcagtgcaccaatcgcaccaatgatgtttcatccaccgttttcatcacaaccccgaatcaaactttttcaatacgattgcataacccctcttcacacaatcaccaccgtccgattccgtaacatgcgttgagtccgtcggtctaccggtgtatctcttcgtttgaaacgtttaccctggaatagttatattttcaatagtgtttcagaaaatattttcagcatgttttgacgaaaattcatcaaaaaaccatttccccccgggcgcgtcgggggtatttgaaagtatagaaaaagggctcccccacaagggagagcccttacagacacagtcattcaacgacattgactgaagtcgaccgaagcactcgaacccacattgcgagctgtaaacgatgtcaatgtgttcgaggtgaccggcttgccacccacatacgaacccgtcaccggcgaataccgcaccacgcgcgtaccgccatccatgctgaacagtttgtttttgaacagcgaatcatcggacgttgaagcggtactgttgttcatcaccgccgtcaacaccgcatgctcgctccacgctccccccgcaccggttgcatatggtctggtttttaccacgacggaaccataatcatcaactcgcccgccggaccacgtggcctctgtgtactcaatcacagcgcattgccgaatcccatcggcatcagtggtcaccaaagtcaacctgtcaccgctggcagcctcttccacaccttcggcattgcgaacatatcggtccagagcctgcaccgatgtagctatttccgtagccgatctggtgcggatagcatcggctgtggtggaatgcaaatattgtacgatcgacaccgtgaacatggtggaaacaatggcaaaaataaacaatgaaaccatcatctccaccagggtaacgccgccttcaccacgagcacgcctacggagcgcacgtaataatcggcgattcagactgaatccagagttcttctcttccataagccgtcccgctccttcaggccccgatcacattcagcagttcattggtggtatacacggccgttttgtctgcgtcaatattgtccgaccaggtgacgcctaccaccacgcgtaccatcggcatatacgttttcgccataaaggtgaatcccttagtaggaatgttgtcctgactcaggatgctggatcgcagcgaggcgtcaggagtaccgtcaagaccgctaatggacgcatgcccgtcaatacccagttccgaagcggttctacaatccatggtgccgctttcccgatagcacttctcaatcacggtgttcaccgtatatgtagtatgtttggcgtctttgcccgtggtagtgcgcaccggctgaatgtacttgctcgtatcggcatccggagtggccgtagcctccaaatccgagaattgtgaggtgatggcccccactgccgtgagattcgcatgtgctttcttcacatcatccacacccatgccaggcagcaaatccgtgtaataggaggatggcgcagaagtatgatccgctatctgtgcgcgcatgcgttcgataccatcactacccaaagcaatggctgctgaacgctgctgctgggcataagaagtacgaatcgcagtaatcgcgaactgtgcggcggcaagacctgtgatgctcagcaccacaatcgccaccaatacctcaaccaatgtgaaacccgactcgccacgtttcggcaatcgtttgacgttatgtattgcaagccctgtcgcggcatcatttaccgccctacgccagctgtgctccatgagcagctccttcatgcagtatcaccccatcatcggaggcaacaggaaaaatcaccgcagaaaaggcggtgcatgaatatctgtactgtatcacgattccctgccaacgttttcacacccttccaaacaccacatgacaattggcgtttcagtcacaaagccgctaaactatgcgagtagtagtgcacaacactgcaatcgttagctcacatgaccatgaacaactgaacattctcaggcccgcaaacacctgtgttcgcaaagggccataagtcataccgtgcgttccggcgcatggtccaggaggtcattatgagcgacgccggttcgggaagtcgtttccctttcctcaagcgcaatcgaaacgacgacacgccgagcgatttctcacagcgcatggatttgaattccccggtcacaggagaaatcaaccagattttcacgccgagccagccacgccatgccgctgcacccagcgacgccactagcgactttcccgccatgcccacatccaccgaaggcatggacgaaaacaccgaacgcgaatatgccatggcgctagctcaaggcatgagcctaccgttcgtagacctcaacgaataccaagtagacaaagaagtcatcagcatggtgccggacgacctgtgccgtcgcaaccagctgctgccattgtccattgtcaacggacgcatcaccgtggccatggccaacccgaaaaacttcgccgccatcgacgacgtgtccgccagcaccggcatgccggtcattcccatggtggcgatgccttctcaggtgaaggacgccatcaaccggtacctgcgcgccaacgcggagctgaccgagctgtcgcacgaaatcgcggcgaccgccaagaaggaagtggacctcgaatccgacagcggcgaggacgcctcccctgtggcacgcttcgtcagcctgctcatcaaccaggccatcgacgaccactgctccgatatccacatcgaaccgcaggaagacggtctgctcgtgcgctaccgtatcgacggtgtgctgcacgtgttccaaaaggcgccgaaagccatgacccaaggtgtgatcagccgcatcaaggtcatgtccgatatggatatcggcgagcgccgtaagccgcaggacggccgcatcaccgtcaagcacaatggtcagaaggtggatcttcgtgtggccgcactgccgacggtatggggcgagaagatcgtcatgcgaatcctgagcacgccttcgggcaatctcaaggtggaggatttgaatttcagccagcggaatttcgacgtgttctccaaggcgtacaaccgtccgtatggtctggtgttggtcaccggtcctaccggttcgggtaagtcgaccacgttgtatgccacgttgggcgatgtggcgaagccggaaatcaacatcattacggttgaggacccggtggaattccgtatgagaggcatcaatcaggttcaggtgaacaacaaggccggtatgacgttcgccgcggctctgcgttcgatccttcgtgcagaccctgatgtggtgctcatcggcgagattcgagatcaggagaccgccaacattgctattgaggcttcgttgaccggccatttggtgctttccaccctgcacaccaatgatgcgccaagcgcagtgacacgtttgacggaaatgggtgtggagccgttcctattgagctcgtcgcttgctgcggtgatggctcagcgactggctcgccgcctgtgcaagaagtgcaagcgtcaggatactgccaccgaagcggagcttcggacgttgggtgttccacacatgccagatacccctcttccgacgatatggcgtccggtaggatgccgagaatgcgccaacaccggctatagcggccgtgtggccatccagcaggtcatgggcgtggattcaacaatggaggatcttatagcccgtggcgccacgtcgattgatattgacaaggcggcgaaggagcaaggcatgaccacacttcgtaaggacggttggcagaaggcgcttcaaggcattacctccgtggaggaagtgcttcgcgtgacggtgtaggttccacctgacgttacatgcacctatgcacctctccgcacttataaaacacctataaaacgttcggttgcgtcggcgcgtcgaagcgccggcacgaccgacattttcagacagcaacccacctattaaaaggacaatgatgaccatcgagcaaacgtggaacaatggcggatatctttccggtctcaaaggcgtgaccattcccaacaacactccatcgttcaatgaggatccccgcaagggacgtcattggtcttccgacaatgcgattcaggcagatgatgaaagccttaagggcattttcgcttcgcttaattcaatgccgactgtaagccagcaggatgtgcaaattcccgacccgcagccagtttcacagtctcaaccatccgaacagtctgttgctcaacaacagactacgcaagccatacaacaatcgcaggaagcgcatgtttttccaacaacaagcgaccgtcaaccagtcggtaccggcagcctgcagtttgatgaggacactgacgcgacccagcaaaatcccgcatatgaggagcatggtccgatccagcagatcgatagcaatccaccgtccttcgtaccgggtgccacaccattcgctaagcgacagaccgacatcgccgaaaccgcagcgcagcagatgcctccgaccatcactcacattccgcaggacgcagctttccaaaggccgcagccacagcaacagcagatgtgtcagccccagccgcagaccaggccattcgcggatttcgtagtgcctgaaaccaacgacgccgacgaggatgccgttccggaagaacgtaagatcaaggccgagcaggtcgaacagacgctgcgcaccgaacatccggacgcggacgacgaattcgtgtcggccatccgccagctggttaagctcaatgcgtccgatttgcacttggtaatcaacgacccgccaatgctgcgcgtggatggcaagctgcgccccgccaagggattgagcgtgtggacgaaggatcacacgtacgaagcagtgaaagtcatgaccaacgaattagagatggaacgtttcaaagatgatctggaacttgatatctccttcgccattggcgatctgctgcgcttccgcgtgaacgtataccgcgaccgtatgggcgtatgcgccgcgttgcgtaccattcctacggaaatcaaaaccgcgcaggaactgggaattgacccgcgtatcgccgaccttgcgctgttgccacgtggtctggtgcttgtatgcggcccgaccggttccggtaagtcgaccacactggccgcaatcgtggacaaggcgaatgcggaacgtgccgaccatatcatcaccatcgaagacccgatcgaattcgtgcatcagcataagcgttgcgtgatgagccagcgtgaggtgggcaccgacacgaagagcttcgcggaagcactgaaacgcgcgctgcgtgaggatccggacatcatcgaagtcggcgagcttcgagacctggagaccatctccaccgcattgaccgcagtggagaccggccacttggtgttcgctaccttgcacacgcaggacgcaggttccaccgtggaccgtctgatcgacgtgtatccggaaaaccagcagcagcagattcgcgtgcaggtggcttccaccctgcgcgccgtaatcgtgcagacgctgattccgcgtgccagtggccatggtcgtgcgccggcaaccgaggtgatgatcaacaatcctgccgtcgccgcgctgattcgcagtggcaaggcgcatcagatccggaccgtgctgcagtctggcgagaaggaaggcatgcacacgctcgatcaggatctggcgcgactggtgaacaagggcgtgatcacattcgaggacgcgctggtgaaggtgcaggtacgcgaggagttcgagaagctctgcggcgcgcgcaagtcgttctaaggatggccggcacagctggcgcgatggtgtgcccatgcatccaatggcggttccgcaacatggaatatgacggaaccgccatggtccatgcgcggccacgcaataatcgcaaagtcacgcagcaatcgctcgtatttcgaacgcaacgggaaacaggaaacatgagttctgcaacagtagcagccacagacaacagaacacgatgcgacgcaatccggcattggctctcgccgcatcgtctgcactgcatcgtgctcgcggcgtacgtcatcgtggtggccacagtgatgtgcttccacgaaccatggttcgacgaggcacaagcctggctcatcgcgcgcgactgctcctggcgggagatgattctggagcgcccgcactatgaggggcatcctccactgtggtggatgatgcttgccatacccgccaagcttggcgtgccgtacgagatgggattgaagaccatcaacctcacatgcgccgcgcttatgatctggctgttggagttcaagaccaagctccctgaggttcttaagggcatcctccctttctcctattttctgtgctaccagtacggcgtcacgtcgcgtccctatgcgctgatggtcgcggccatgctgctggtggccatcaactggaaaaaccgtgacgagaaaccgtggcgcgaagtgctcagcatgatgctgttgtgtctgaccagctcatatggactggtcatcgcaggcatgttcgcggcgaattgggtggtgcggttcgtccggcaggaacactcgctgatacgtaaccggcaacggttcgccgcgctgctggcgctgctcgcggcggcggtggtcatactgatcgacgtgatgcccgcaaaagacgtgtattccggcaatttcgacatctccggcatgacgcagccggcaccactatggatgcaaatttgcaattcctggctgctgctgccggccgaagcattattcacctcgacggtgtcggatacgaatctggtattcatcggactgtcgtcgacactgctgtacacgggaaccgtgtcatgcctcatgtgggccccgctcatccacatcagccgacgccggcacaacgcaatgctgctgctgagttcatacacagtgatgtgcttggtgttcgcgcagcatttctccatgcaccatctgggcatcctgctgggatttttcatcgcggtgctcgcgattgactgcgacgagcgacgtatcagcacggacgactggccggcctggtgcatcaccatggccgaccgattcatcggcaagcttggagcgaggaaagcgcgcaactatctcatcacgctgaaggccctcgctttaggtgccatgctcatcagcgtgtattggacgatcaacgccagcatatgcgacatacgatacgagtattcctcatcccggacggtggcctcgttcatcaagaccaatcatctggagcaataccgttggatggctggctggactcgcatcaattccacgaatgcgtccccggatgtcaaggaacgaatcaatcaaggcggctactgcgccgatggcaaggactgcatcgactacacatcgtgggtgagcggaacactggtcaccgccgacccgtacttcaagcgtacgctcatgtccaatgcctacaaagggcgcagctacatctcttgggaatggtgcatagacccctatgccggcaaacaagacatcgaaacctggagatcatggggcgaacccgaattctacgacaccatctatcagccgttcttcttcagcgccctcggctatgaccggaacgactacacgaaaatacgcatcgccgaaaccgtcacgccatggaaagaccagcgatcgcgcggttccgtggaaatctacgtacgcaacgacatctacaagaacgtcctgcactcccctgacaccggcatcgcatggccggatggagccaaacggcggtagatgggagcatcggtgcatcacacgagcaaggtagtctgagaatatgccgtaccacaacccgaattcacgcagccggcggaatgtcctacgcatcgtgggcgtgctcgtcgtgcttgccgtcatcgccggcgtcgccaatttcctgcacgccaccaccagtgaagcggccggcaatgtcaagccgcagatcgaaaccatgcaaggcatccggcagaccgcgcaggacagcatcacgttcgcgcagggcctggatgatccggaccgattcgccgcgcacatcgaaaccgtgcagcagtgcatggacgattatgaccggcttgccgacgccaagcagatcaagtatctgctgtcggacaatctgcaggaacgcatcatcggactgttataccgcaaccagcagcgcaccatcatcgacagcatgcgcgtggcggcgcataatctcgacggacagaccaaggagctgctcagcgcggtcgacgcggccatgtcggatgatttcagccagcatgcagcgcaatggctgctgcaagtggatgatccgacgcaggtgaacgagctcatcgaccgatacggcaaacagcgcgcgtatgcatcgatgagggagatgctcgccgacctacggtcgctgcacaaactacgctcggacgtgaaacagcaggtctcgactgcggtcagcaatctgcataacgcggaagccgcagcggctgcgatcgccgtgcccgaacgcaacggcgatctcgatccggccgggtggtacacgctcgccacgaacgtggcatcgacgatgggcgtgcagattgaacagaccatggaattcaactgcggcggccagtcaggtgagaatccgagtggattcgtggctgcgtattactgccagatgcccgaccgctcgcagaggaatgtcgtgcatatgctcaccacgcatccggattggacgcagaccgcgcgaagcccttggctggtggacatggtcaagcacgagctctcgcaccgctcgatcatgatctcctgcggcaccacgcaaccgacaatcgcagccgaccgtacggaggcggtgacgaattcctattcggtgctgtttttcggggccgaccgcgaccgcatcacgaatcagcagcagggtgtcgccgaatacgcgatggatgcatccagcgatcagctggccaccgctatccacgatggcaattgcgagtgaggtaagccagttctcgcttagcgactattgcacatccttgaattcgatagtccagttcttcgcgtcatcaccaagcacattgcgcacatactgctctagaatagtccgcgcgcgagcttcggcttgggcaagcaacgccgaatcggttttcgcctgcttcagcatgctttgctgggccttatcaaacatttccgttttctcttcggcggtaatcgaagtggcgaaaccagtgctcaccagcggtttgctgaacgacttctcatttacgtccggatcatccaacacgtgagctggaggcacggtaatgattactctatgaccgttggcatctggactaattgttactttatcggcatcaataccgtacttcacgatgccactgtattccatccacatacgtttgtagccattattgaagaaccacgatccctcatgactgagcttggccgtgttgtggtaataacattttaatgtggccatctgtgcgatatacgtggcattcgagaaagttgggatagcttctttcttttcctcgccgcaccctacagcagaacatgcaagcgtagcaacacataatgcggcaatcgcacgtttcatggaacgattattcgtcagcatgcgcggtctccttagtgagctttacggtctcggccttctgcaatttgtatccttttgcttccacgagatccttggtcaacgcatccacagtttgttcaagattgctggcagcaatagaaataatgtctccgtttgtcttggtctcctgttgcgcatcctgcttgcaaagcttgatcacctcatcaatttcaacggacggattgttctcgaaaaagtcgaggctgccgctatcaaccacgacgtccccaatagtcggcttcggcagaatcggagtgacggttttcgcggtatcgtccacttcgaacgtgatatcgctcatcttgacgccagcagtcaccgtcgcctcatatgcaacatgccacttgtccttaccagcattgtctttctttacagcaacaccgccataatggaatttcgcggtcgatagatcgtcgatattcacagccgcctgcaactggctttccacactgatggtagattcggtccttgcattgtcaaaaacaggtttaacgacaccgttccacacaaacaggacaactgcaacagtgacaattgccgcaacagcaccaaacaacaccttacgcaacttttttgcactgagatcgccgaacaacctatcgcaaagaccgccccgtctccttcgactcccgtcatttctcgccaacgcacattcctttcacggttctcttccgtcaacaattctatccccgcatgcaaatacataggggcgtcacaaacgtctcaggaaataatacggggaagcccatctcgtggaatgattatcggaaataatccgatatttgatgacgtttcatcataatgaaaatgcccgccatgtcttcctgcaaggcaggacagcacacataccacttactacttccacgcctgcttaaacattcggatgggatactcaaaagagcgtggaagaggcgacctgctattcagcacacgaaatgctgcagccgaacgtacaatggtcgccccatgtcttcgtattcggcgatgccgtttttggactaaatcagccaatcggtcacgtccttctcggaaacagattccgagaaacgatgcccggtaagccatgtaccactgcctgccattttctggagcgtggatgcactgttgccgatatcggagctggcggaagtgcagaacggaatgatcgtcttacctgcgaaatcgttggatttgacggaatcgttcaccagccaaacaggtgccatccaccaaatcgggaagcccagatacacagtgctgccggcaccgaccatgtcatgggccggaatcactcgcggccagcacgttccttgacataaccgacgaagcgatcgaccgcctcaggggtgtcgtggcgaaaaaacatgctggtcttggtgtcaaggcccgcgatggttgtcatctcgctgtcggagagccggaaatcgaagatgttcaggttttcttccatgcgctccttgtgcgtggacttgggcagagcgacgatgtcgcgctgagtgagccaacgcaggatcacctgcgcgacggacttgccatgtacctcgccaatcttggccagggtgggattggagaacatgttctgcatgccctccccgaacggagcccatgcttcctgagccacgccccgcttgaccatgttcttgcgagcttcgatctgctggttgagcggattagtctcgacctgatcgaccatcggggcgatctcattgaaggcgaccatatcggccagacgatccggatagaagttactcacgccgatggcgcggatcacgccgtccttgtagagcttttcgagtgcacgccacgcgccgtaggtatcggaaaacggctggtgcagtaacaccagatcgagatagtcggtgccaagcttcttcaaggacacatcgacggacctcagcgtgttctcatagccgtaattgctgatccagatcttggtagtgaggaacagatccttacgatcgataccggaatccttgattccttggccgacttcggcctcgttgaagtacgactgtgcggtgtcgatatggcggtacccggtctcgatggcctcgcgcacgcagcgaggagcatcgtccttgctgatctggaagacgccgtatccgatcttcggaatctcaacaccgttggcaagtttcacgtattccactgtttttccttccataaattcgtcggtattcagtgccggcatgtatgccgttctgaccctcaagataaaatccggtagccgctaccggtcaaattacggcacgccggtactatctaccggtattaataaccggaaatgtgacatgataggtacaaacaaaaagaacaatgcgcctcaagcccgaccccatccggcggcacccgccgaacgtcctgccgcgcagcgtccgaaaggagccacgtatggcaatcacggcagtgccactccataagaacatgaaaacctatacgatgaagcaggcctgcaaactaaccggcatgaattacgaagcattgaagttctattgcaattcaggactcgtgcccggtctcaaacgagaccagaacaaccgacgcgtcttcgacgagcgatgcatcgcatggatcaacgacctgacatgtctcaaacgctgcggtctgggcatcaaggagatgcggcactacacgcaactctgtcttgaaggtgagtcatcgataccggaacgtcaggaaatccttgccgaaaaacgcgagcatctggagacgcaactggaggaactgcgtaaagccatcgcctacatcgatgaaaaacagcgcttctacgccgacgtgactgccggcaggacggcatactgcagcaacgtcatcgacacgacgcaaagcgactgactgcgttccgtaggtgatttttgcgttccgtaggcggtcagcttcgaatccggacacgagcaaacgcctaattccaggcatctcgccgatgcttatccggcagcaaccacctacggaagcccaaaatcacctacggaatcgcgcctgtcaagggacgcagatagattaagcactgttgtaaacatgcgggggtgcttgatggccaagtccatcaagctgagataggcatgaacgcctgaccctttgaacctgttggttaggaccaacgtagggagcagatcatgagcgatgactcatccgccaatgacgcactcggcgcattgcgtgccgccatcaaacaagccgtcatggacgtacgcgagcagacgccgctggcgcagtcgttcaccaatttcgtaaccatcaatctggtggccaacgcgcagcttgcggcgggcggcaccgcggccatgagctatctgccggatgatgtgatcgccaccgccgaaatcgccggatcgaactacatcaacgtgggcacgttgctgccgttcttcaaggacgcgctgccggaaatcgcgcgcaaactgcacgaaaacggcaagacgtgggtgctagacccggttgctgcgggcattggcgaaacacgcacgttcattcttgaatcgttccgtgacgcgcctccgaccattgtgcgcggcaatgcgagcgaggtcatcgcgcttgatgcgatgtgggggctggccgacgccgacagcactgatccgaccacgcgtccggctggagtggaggccgttgacgaggtcgacgcggccatcgacgcggccaaacgtgtggcccgccatttggcgaagcactcccccgtcggcaagggcgcggttgcggtgtccggcgcggttgatctggtgaccgacggcgagcgcacgttccgcctgcccggaggcagcgcgatgatgacgaagatcaccggcgccggctgttcgctcggcggcgtgaccgcaacgtatcttgccgtggccgagccgctggtcgccgcccttgccgcgtcgctgctgtatgatcgtgcgtccgaaatcgccgaagtcaaatccgatggccccggttcgttccaggtggcgctgctcgacgcgctgtggaacgtcaccgccgatcaggtggccgcgtccgacatcatcgaaaccaactgaccgcaacgttccgtggatggtttcgcaccatcgcaatcgtatatacggaatatatacgttcagtgcggtgcgacggaaaataacaagacttcttctggagcacttgcccaaaggacaacaaaggggaaaccaatgaataattatccattcgcctcgatgcgcgactgctttgatatgagcgcgtatttcgtggtcggtccgcaggattgcaagggccggccggtgacggatgtggtggatgacgcgttgcgtgggggcgcgacgttcatccaattgcgcgccaagaacgcggatgcgaaggatatcaccgaaatggcccgcgatatcgcgcaggtcatcaagaacagcggcaagtccgattccgtggcgtttgtgatcgacgaccgcgtggatgtggtatggcaggcgcgcgacaagggcatcaaggtggatggcgtgcatatcggccagaccgatatggaaccgcaggaggctcgcgcgctgctcggcgaggacgccatcgtgggcctgtccgccgagaccgaaagtctggtgaagcttatcaacgagctgccgagcggctgcatcgactacatcggcgccggcccgctacatgtgtccaccaccaagccggaggcttccgtgggcggcaacgacggttccgggcatacgcttgacgaggaacagatcaacgcgatttgcgcggcgagcgagttcccggtagtggtcggcggcggcgtacatgccgacgatatggagatgctggcccgttcgaaggcggccggctggttcgtggtgtccgcgatcgccggtgccgacgatccggaagcggccacccgcgaaatggtgacgcgctggaaggcggtgcgcggcgacgcgaagcacggctatgcgccgcgtgtgaagtagtccgtcgtacaggaaatcgacaagcccgctgagatgagcgagaagttccgcaagggtggttctacactgtatcagtgagctcagtgaagataatcaatgaatcagtgagcctaataaggagagttaccatgactagcacattgccaccggtattgagcatcgcaggatcggattcgtccggcggtgccggcattcaggcggatttgaagaccatgctcgccaacggcgtgttcggcatgaccgcgatcgcggcgctgaccgcgcagaacaccaccggcgtgacgatggtcaccaacactcccccggaaatgcttgcggcgcagatcgacgcggtgttcgaagacattccgccggtggcggtgaagatcggcatggtgtccagcgccgagctcatcaccgtgatcgccgaccgtctgaccgcgcacaacgcgaagaacgtggtgctcgacccggtgatggtggccacgtccggcgcgaagctcatcgaggatgatgccatcgcggcgctgacgtccaaactgttcccgctggccaccgtgatcacgccgaacatgccggagacccaggtactgtgcgacttggccgtagagcaaggtgcgggcgcaatcgactatgagaacggcgaatccatctccaccgagaacgacatggtgaccgcaggtcatctgctcgccggccatttcggctgcgcggtgctcgtcaagggcggccacggcacgcatgacgcgagtgacgtgcttgtcgagccggatggcaagatcacctggttccgttcccgtcgcatcaacaacccgaacacgcacggcaccggctgcacgctgtcttccgccatcgccagccatttggctcttggcgaggcgctgccgacggccgtcgaccatgccaagctgtacctgaccggcgctttggaagcgcagctcgatcttggacatggttccggtccgatggaccacgcgtggaagtggcgttgaaccaagccacgcaaaccacgcgaaccacggcagccgttggaacagtacaacaagtaatcgcacgaaaacacacgagacaacgctgagaaaggtaatcatgacgctcgatcgcaacgcagaaaagcaggaagtgcccgtcaatccggaaaccggcaaaccgtatatcaacacgcttgcggcggtggccatctcccccgccggagccagcccggagaagtccacgtacgtggcgcaggccgtggacgtaatccgtgaatccggcctgccgaacgagacgaacgccatgttcaccaacatcgaaggcgacatcgacgatgtgctcaaggtgatccgcgacgctaccatgaagctcgccggccagggataccgcaccgacgtggtgatccgtctcgacatccgccccggtttcgaaggacagatccacgccaagcaggaactggtaaacgagattctgtcgaaataacccctgacggaacagggaattccacacgtaaggcgcgtttttctgggaaaagcgcgcctttcgcttttgtttgggtatagtgttgcgattatgaccacgatgaaggaaatcgccgaacagacaggggtatccatctccactgtatccctcgtgctcaacggacgcgacgaaggcagggtgaatcccacgcttgcttcgctggtgcggaacaaggcgaccgaactcgggtacaagatcaacccgttggcgcgaagcctacgcaccaacaaaacccgaatcctcggcttcatcagcgaggaagtcgccaccacaccgtacgcgggcggcatcattctgggcgcgcaggacgcggccagcgcctacggctacatgctgttcaccgtcagcaccgacggcaaggcgagcgaggaaaacgagatcgccacactgaaaaggtacggcgtggacggattcttctattcgaagatgtcgaaccgcatcgcacatgttcccgaatcgttgaacgaataccccgtggtgatggtggacgccaccgaccacgagaacaaagtgcccagcatcgagccggacgagttcatgatcggctacgacgccacgaatcggctgatccaggccggatgcaaacgcatcgcatacgtgggttgcgcggaaaacatgatcgcgcaggacggtcgtcttgccggctaccgcaccgcgttgcaggaggccggacgtgcgttcaacccatcgctggtatgcaacgtaatgaacaacggtccagctttacgcgccgtgaacaagttgttcgacgacgagcatccggacggcttcttctgcttcaatgatgcgcgcgcctggtatgtgtacgaatgcgcggcaagaagagggcttacggtaggcaaagatatttccgtggtcggcgtggacaaccaccgcgtgttcgcagagacacttgaaccgcagctgaccaccgtcgaactgccacattacgaaatgggctattggtcagcctgcaagctgatttccatgattgaaggcaaggatgtggataccagttcatgtccatccgccagagcttccctgccgccgcttgatgcgccgattccggcgaagatccactgcgcattgttggaaaaagattccgtcatatcctgatttttctgtttttacaacgattcaaatgcttacgattgttcgcacagccattttctatacatgaaaattgtgcgtttgttcacgacacgccgaataaagcaatcgtgtcaacagtccgccagcagttgattcaggcttaatttcaactatccgcaaatccttacaaacgtttgacgtcaaacgattgacgtcaaacgtttgacgaagcagttgccatatgctatcttgaagccatgttcgcttttcggcacggcagctgaaatccgagcaggcgcaagccaaaacaacatcggaagcgatcgatgccgcgcggcagcggcaccgcgaagagaaaaagagaatcaaaatggcaagtaaaacacgttctgtatggaagaatccttcctatctgcagagctccttcggcattttcatgttcttctgttcctggggcatctggtggtccttcttctcccgctggctcactgacccgacccacggtctgggcatgagctccgcggaacagggccagatctactccatcaactccttggccaccctggtcatcatgttcgtttacggcaccattcaggaccagctgggcatcaagcgcaagctcgtgatcttcatctctgcggtcgctgcatgcgttggcccgttcgtgcagttcgtgtaccagccgatgctgaccgccggcggcaccacccgattcatcggcgtgcttctcggctccatcgtgctgtccgcgggtttcatggccggctgctccctgttcgaagccatcaccgaacgttactcccgtaagttcggcttcgaatatggtcagtcccgcgcttggggctccttcggctacgctgtcgtggcgctgtgcgcaggcttcctgttcaacatcaacccgatgctgaacttctgggttggttccatctgcggcctcggcatgctgtgcgtctacgccttctggattccggccgagcaaaaggaagaactcaagaaggaggccgatccgaacgcggctccgaccaacccgtccttcaaggaaatggtctccgtcctgaagatgccgactctgtgggtgctcatcgtcttcatgctgttcaccaacaccttctacaccgtgttcgatcagcagatgttcccgaactactacgcctccctgttcccgaccactgaaatcggcaacgccacctacggtaccctgaactccttccaggtgttccttgagtccgccatgatgggcgtcgtcccgatcatcatgaagaagatcggcgtgcgtaactccctgctgctcggcgccaccgtgatgttcgcccgtatcggtctgtgcggcgtgttccatgacccggtctccgtctccatcgtcaagctgttccactccatcgaggtaccgctgttctgcctgccggcgttccgttacttcaccctgcacttcgacacgaagctgtctgccaccctgtacatggttggtttccagatcgcttcccaggtcggccaggtggttttctccaccccgatgggtgctctgcatgatgccatgggcgaccgtccgaccttcttcaccatctctgccatcgtgtttgcggctctggtctacggcttcttcgtcatcaagaaggatgatcaggaagtcggcggcgatccgttctacactgacaagcagctcaaggccatgaaggccgctggtgcggaagtgaaggcctgagtctcagcccgtactaagtcggcgtacggcgtcgatggtggtcgcaacctacatcccttctcccgcgatcatcatcggtaccgtacgcgtcataacaacaatcgtggtgtccgaagcgtttccctttttccgctttgggcaccatcttcaaaaagctttttacccaacaattcataacccagattcagaaaggcattcaacgatgactggctttactccggacgcacctgtccttcacgaaatcaagaaccacggcgaggaactcaccaaggcagaggccggcgtcgcggccttcgcagccaagcgtaacaaccgctggtatccgaagttccacatcgcatccaatggcggttggatcaacgatccgaacggcctgtgcttctacaagggccgttggcacgtcttctaccagctgcacccgtatggcacccagtggggtccgatgcattggggtcacgtctcctccaccgacatggtcaattggaagcgtgagccgattatgttcgccccgtctctggaagaggaaaaggacggcgtcttctctggctccgcagtgatcggcgacgatggcaagctcaggttctactacaccggccaccgttgggccaacggcaaggacaacaccggcggcgactggcaggtgcagatgctcgccgaaccagacaacgatgagctgaccagcgccactaagcgcggtatggtcattgattgcccgaccgacaaggtgaaccaccactaccgcgacccgaaggtctggaagaccggcgacaagtggtacatgaccttcggtgtctcctctgccgagaagcgcggccagatgtggctgttctcctccgatgacatggtcaagtggacctatgagcaggtgctgttcgagcatccggatccggacgtgtttatgcttgagtgcccggacttcttcccgatcaaggacgtcgaaggcaacgagaagtgggttatcggcttctccgccatgggcgctcagccgtccggcttcatgaaccgcaacgtcaacaacgccggctacatgatcggcacttggactccgggtgagcagttcaagccggaaaccgagttccgtctgtgggattgcggccacaattactacgcgccgcagtcgttcaacgacggcaagcgtcagatcgtctacggttggatgagcccgttcgtcgagccgattccgatgcaggacgacggctggtgcggcaacctcaccctgccgcgtgagatcacgctgggcgccgacggcgacctgcacaccgcgccggtggccgaaatggaaggcctgcgcgaggataccgtcgatttcggtgcgatcgatctggacgtcagcggcgagaagaccattgtggacgatgccgaagccgtggaaatcgaaatgaccatcgacctggccaactccaccgccgagcgtgccggcctgcgtgtccacgccaccgaggatggcgcctacacgtccgttgcgtatgacgatcagatcggccgcgtggtggtcgaccgtcaggccaacgctcagggcgatcgcggctaccgtacggcaccgctgtccgaagccgaacttgccgccggcgaactcaagctgcgcgtgtacgtggaccgtggctgcgtggaggtgtacgtcaacgacggccgtcaggtgctcagctcgtacagctacgcgtccgaaggtccgcgcgccatcaagctcgtggccgaatccggcacgctcaaggtcaagtccctggtgcttcaccacatgaagtccatcggactggaatgatagacgtctgtcatggttgacaggcaaacaaccataagacagtagcaaggggtatatgggaaggcctccgcatcggaagggtgcggaggcctttctatatctgtctctctatatctaaagtgatatctgggatggtatccaacgcacgttatctctcgttactgccgtacttgctgtgcgggtttgcctacgttccgccccaccgtctatactggcgagccggtaacaatcttttctggccgattggcgggcaggctcctcaccttactgatttcccgcagtcggtcacgtgcgcgtccactttgacgcagaaagcaaggtgaacgatggcggaatcgcacgttcaacgcaaactgcttgacatgatgaaacgtcgtattccgacagtgatcgccatcgtgttgctgctggcggtatgggaggcatgggtacgaatagggcatgtgccgtccacgatgatcgcctcccccagtgagattgctcaggcgaccgtcgaaacctggccgacactctggcccgcgacacaggtcacattgctggaaggtaccgtcggtttcctgcttgccgtggcatgcggcattttaattgggattctgctgtattgctcccgtgttgcgaatgcggcgctgttcccgttactgtcggccgcgcagacgatgccgttgatttcgatcgcaccactgttcctaatctggttcggtttcgagatttccggcaaaatcgtaatcgtggccgtattcggcctgtttccgattgcggtgcagacgattcgcggactcgaggcagtcccccagttctattcggatgtggcgctgacatgtggcgcaacccgtacgtggacgctgtggcacgtgaagctgcgcgtggccgcgcggcagatctacggaggcatccgcgtctccgccgcctatatcttcgccaccgccgccacggcggaatacctgggcgcgcgcaagggcctcggcatctggctgcaggccgcctacaactcgttccgtacgccgctcatcttctcggccacactggtgatcatcgccatcacctgcgtgctcatgtgcctagtgaacctgagcgagcgtatgctgctcggccctgccagcgatgacgaggatccagacgccggacagtgagcagaccaccatctgcggcacaacggacggaggaacttccaaaactggcatcatgcgacgtttaccctgacttttctgacgtttacatgaactcgtccggcagtaccgcgctttattacaagaatgaaatacacaagggcaaacgccgccatgcgccaagatttcggagaaaaccaatatgttatttttgaggcttctgctgttttcgtgggttaggttctcggctgtggtaggcgtatgtcgagtccaccgcatcgggagcatctgagcatgcccctgcgcggacgcacgcggatctcgagcacgggttcgggacgcaatggggagtcggcgatgcgcacgccctcgaccaccgtgcctttgacgttgagaagctggttgaacatgctgttcatcaggcgctttttggctgtgtttttcttggtcgttaaacatcctactcaaaaagcgctctttcttactcccacaacggttcaacaacgaacccgcacccacgaaaacagcaatagcgccgcttttctactccagattcgcgtggtattcccacagggaatcgaggtcaagattacgcttgcgcaccatggacatggcgatggcgtcgccgaccagcagcagcgactgctcgaacaggctggtcatcggctgctggctgggcttggtgccactgccgggcttgcctgcggccggcacatggacgaacagatcggtgtactgcttcatcgggcagtcttcaacgatgccgatacgtgccactttggcaccgaaagatttggctttgccggcgatgaacagcgggaatccggttttgcctgaaccggagccgacgatgagcagatccttctcgcaaatggccggttcggtgatctggccgaccatcaccgtgtctacgccgagatgggcgagacgcttggcgatggcttccagcgcgagtttcacgcggccgacgccgacgaagaagaccttgcgggcgttggcgatgagatccacaagtgcgtcgatttgtgcctcatccacgtgatcgagtacgtcggcgagctcttgcacgatgatttgttcgcagtagcggaaagaggtgggggattggatagtgttttcggtaacggttgcggtggtcatgatggtttttccttgcaatatttatatgtgattaacgtcgttggagattagcgcggattggtcgtagtctctccggtggagtgctcgtaggcgtccatggtcagtcgccatgcttcacggatatcgggggagcgcttgaaaatgccagtgttgccgagcacaaaggtgttggcgccgacttcgcgcatggtcttgaaattcttttcgttgcaggagccgtcgatctgaatttcatagttcagaccgtgctcgtcgcggaagcgagccagctgctcgattttcttcagggtctccggaatcagcggctcgccactgtagccgatctcgacggtcatcacggtgataaggtcgatgcgctccaatagattctccacatccgcaaacggggtaagcgggttgatggccacgcccgcaccgcatccgttttcgcggatgatgcgcagtgtgcggaaggcgtgtgcgcccaacgattcgacatgcggggtgagcattgtagcgccggctgcgaccaactggtcaatccaatggtcggggtcagtaaccatcatgtgcacctcgttgcgtagcgtgctcagcggcagcatctgctcgatccaggacgtgcataggcccatgctgggggagaagtgtccgtccatgatgtccacatggtaggagtcggccacggtgttgaggtattcgacttgcggggcggggttgcggaagtcgctgcagtagagcgagatcgcgaaatgggggttagggaatggagtcgtcattggtattccttatataaaaagacgatgaatgtgtttttggatgtgttcggccaagggtgcggcgcaattatctttcgctcaccctgttgctgaggaatggaatcgctactgtcggctagtgcgcacggccacgcccatggcggtgagtgcgtcgatgcaatccggcgtgccctcggtcacgatgacgtccagtgcgttgcagtcagcgattctgtaggtggagatgcgtccgaatttctctggtgtgatgaggctcatgaccttggtgcccgccttgatgattacacgtttggtttcggcggattccagatacggggtggtgatgccgtgctccgggtcaatagaggagatgccgagcagcactaagtcgcaatgcaattgctgcaaagcggtcagggctgctgaacccacggtctctttggacttgtggttcatggtgccgggcagcatattcacctcgacatggtcgtagtcggacatccacaacgccacggccggactattggtgatcaccgtgccctcccaatcgtgtgggaaggattgggcggccagatagttggtcgaaccgccgtcaaggaagatcacgcggttttcgcagatctcgtccattgccagtgtggcaagtcgctttttggtgtccgccccgagatcgacgcggttttcgaaacggctgagttccgtatccggtttaatcgcgccgccatgcacgcgctgtacagcgcccctgtcgtccagttcctgaaggtccttgcgcagggtggcctcggtgactcccattttcttggcgaagtcagtgacgaccacacggccgttgtcggcgatgtgcttgaggatgagttcctgtcgttctgccttcatcatgtgggtctcctttggctgggcgtatatggggccgaatcatgctcggcgtgtcgtgttttatgtcccataataacagaggattttcgttatgtatcggttgtgattaaaaattcatttcgactcctttcgtttttgtgttgacaactatcgtaaccttgtgttataactttgtcaacaagcaaaacgaaaggcttcgtaagataaaacgaaagctttcaaaatgcttggatgtttcgccgacacaccgcacgcgtagaaacgaaacatcgtatgacaacccataatgaaaacagccgaacgcagtagttcagacaaggaagtacatcatgaagcgctctgagatcaatgccaccatcaagcagttcgaagaactcctggacaagtacaagttccgcatcccgccctacctgtccttcactccggaagagtgggccgagaaggaccatgaatgggatgagattcgcgacaacatgctcggctgggacatcaccgattacggagagggtgacttcgagcacaagggcttggccctcatcaccctgcgcaacggcaatgtgaaggacccgaagtataccaaggtatacgccgagaagatcatgatgagcatgcccggtcaggtctcgcctatgcatttccactggaacaagatggaagacatcatcgtgcgcggtggtggcaccgccgtattccacctgtacaatgccgatccggaaactgaagagcgtctcgataccccggtgcttgtgtgccgtgacggtcgccgttactacgtgcccgccggcgaggacatcgaactcaatgaaggcgaatccctgactttctatccgtacacctaccacgagtactacatcaaggaggactccgtgccgacccttgtcggcgaggtgtccatgtgcaacgacgacaacatcgacaaccgcttctacgagccggtcggccgcttccccgaaatcgaggaagacgagcccgcctaccgcctgctgtgcaacgaatacccggcggccaaggaagactgaatctcgataagcgcaactgattgcacgataagtggcccaacccaatgtgctcctgcaggcgggagccggctcgcgcaacgaggctgagggtggtctggtaatgattgccaagactgccctcggcgcttcgcgtcacctcccgccggtgggaggatgcttccgtagtcgttcgaccgttgccttccgtcaggggaagcattacttttcctttctccatttttctttctggtcttagccccgctatgtccgaaaccatcttcaacctaggattcaccatgcccaacaccgccaaaccatccgtagtcgccgtcggagaactgctgtgggatatgctccctgacggcagaaaaccgggaggcgcacccgccaacttcatctatcacgtcgcgcaaaacggtgtccaaggaaccgccgttaccgccgtcggcaacgatgacctcggacgggaccttgtttccatcctcgccgacaacggcgtcaacgtcgccgctcaagtcaacgactatcccaccggggtcactgctgtcagacttgatgacaatgggattcccgagtacgacgtcgtcaaaggtgtcgcgtgggatcatatcgaatttactgacaatgtacgcgccctggtgcgtgccgccgacgcgatctgctatggcaccattgctgcccgtgaggcatggggcacacgcgacaccatctatcagatgattgacgctgcacgccccgatgccattcggttgtttgacatcaacatccgctccggattcgtcaacaaagaagtcatcacccgattcctcgaaggtgccaccgttctcaagatcaacgacgaggagctgcccatagtggctaacctgttcggtcttgactcgccgggcaaagatatcagatcgcagcagcgagcaatgaggacactctgcgaaatgttcgatttggatgtggcgattttaaccgctggagacgcctacagcattgtgatggggcatgacgaaatctcgattctgcccaccccgcaggttgaagtggcagatactgtcggtgcgggtgactcgttttccggggcgttccttgcctacttgctgcgcggattcgcaatccctgccgctcatcgtcgtgccgttgacgtctctgcgtttgtgtgcagccagtccggcgcttggcctcgctacccgcaggagctaagagagcagcagcctcacggcctgtcgtcgatcggatccggcaatccacttcagtaatcggcctctcgccatccgaggcatcctctcatccggcacatcttcaacaaagaaggattcaccatgtcacaacacaacattgttccccgccttgccatcagcgctgcgctcggtgggctgctgtacggctacgacaccgcagttatcaacggcgcaaccacagtcatcaaagaacacttccataccggcgatgccgtgctcggccttgccgtaggatcggcgctcatcaccggatgcgtcggcgcactgctgtcagggcgcatcgcggacaagatcggccgcgtgccgatgatgaaaatcgccgctgtctgcttcctggtctgcggtgtcggctgcgcgttcgcgccgaacatcgaaatcctcgtcgcattccgtgtgttcggcggtttcgcggcgggcatcgcctccgtggtcgcgcccatgtacattactgaaatctccccggctcgggagcgcggcgtgcttggctctctgcaacagctcggtattgtgctcggcattttcgtctctctgttggtcaacgcattgctcgtgcatatcagtggcggtgccggcgcgatgatgggaccaatgatgacctggcagtggatgttcctgtgcatgtgcgtgcctgctttgatttacggggtgctggcattcacgattcccgaatcgccgcgctaccttgttgcgcagggtcgcatggaagaggcggccgtggtgttgaagaagattggggatgccgaaatcaacgtggacgagcaactcgcatccatccgcgcgtctctcagtgctgaccgcaagccttcattccgtgaccttatcggggcaaacggccggctgaaaccagtggtttgggcggctatcggcttcatgatcctcaatcagttcactggcatcaacgtcattttctactattcgaactcgctgtggagcgccgtaggcttcagcgaaaagaactcgtttaccatcaccgccatcacttcgctggtcaacatcgctgcaacgcttattggcatgatgcttattgatcgcgttgggcgtaaaccgctgttgctcgcgggatccatcggcatggtcgtggctcaaggagggcttgcaatattgtttggtacggctccgatggctaacggctctcctgtaatgggttcggtgactggccctctggctctggtgtgcgccaatctgttcgtggtggcgttcggcgtgacttggggcaccgtctcgtgggtgatgctctctgagatgttcccgaattcgatgcgcggtgctggcatggccgttgggactgccacccaatggctgtccaactttgtggtcaccgtttccttccctgtattgcttggcgtcaatgtcgggcttgtgtatggtctgttcgctttcttcgcgatggtttcgttcttctttgcgctcaagtgcatgaaggagaccaaaggtgtagcactggaagatatgcaagcttgattgtgccgacggtatggaaagtacttaccctttggcgcaacagggtgtttggcaagggtgcggcgcaatcgcgtagccgacttacggagctcaggctgttgatgattggcgttgacagcctagtgccggattgaaatatcaataatcgttaaggagtaatgaaccgatgagtgtcaataaaaatcaagtaatcaactcaaccagcacacgagccgacatgttggcccacatgggcagccttcagcaggccgcctacgtgcgcccgatcgagtaccaggagggccgtgcccacggcctcaaggccatcgaggtgaagaacggcccgctgcgcttcgtgtccatggccgaccgggccctcgacatctgccagttcgaataccgcggcgagaacctcaccttcctgtccaagccgggcctgaacggccgcaaccagttcgacaccaacgggctggaggcgcagcgctccatcatgggcggcctgttcttcacctgcggcttcgagaacatctgcgcgccgtacgccacgcctgagggcggcaagtacccggccggcagcttcccgatgcacggccgcatccgcaccacgccggccgagcatgtgggctccgacgcccactggaccgccgaaggcgactacgtgctcgaggtctccggcgaaatgcgcgaggccgaactgttcggcgaaaatctggtgatgcgccgcaagatcaccagcgtgtacggccagccgtcgatcacggtcgaggatgaggtgaccaacgaatccttccgcgacgagccgctgatgtggatgtaccactgcaacttcggctggccgttgctcgccgaaggcgccgaagtcgtgatccccagccgcaaggccaccccgcgcgacgagaccaccgccgccgataccacgccgtggaacgaaatccaagcacccgaggcgaaccgccccgaaagcgtgtacctgcacgagctcgccgccgacgaccacggccgcagcttcgccgccgtggtcaaccgcaagctcggacttggagtcgtcatcgacttcgacgccagcctcttcccatacttcatggaatggaagtcgatgggtgcgggcgactacgtggtcggcctcgaaccctcgaactccagcgtccaaggccgcggctggcacgagcagcgcggcgacctgcatacgctggccccgcagggcaccgagcgcaaatcgctgaccttcaccgtcatcgaaggcgccgaggcgatcgacgcgctgatcgcgcgccgcgacaccctgctcggctgacgccagagccggcgccgatgccgtgacgttcgtttcttaggtattttccgaggcttctgctgttttcgtggattagatcgtgggttgtggtagtcggatgtcgagtccatcgcatctgagcatgaccagggcaatgaggttgttcacgtggcggaagccgtaggccatgcggatggtgaccttgatcctgttgtcgaacgcctcgagcctcgcgctcgaatagcccagctcgatggtcctgaggatgtccggtcggcgccgccggatcctcttcgccagttcgacgatctcgggcatgcgtgaatgcgaggccaggaacacccagtgtctcaactcgcccctggcctgttcgagcgggtgcttgagcagggtcctcaatagttccttgagttgccatgaacggtagagccggccctcgggtccgtgttcctgatgccgtcgagcgcatcggtcatccaagagacgatgtggaacccgtcgagcacgcgttcggcggccgggcaccaccggccggtgcacgggtcgatccagtgggtcccgtcgccggtgacgaccctgatggattcgcgctgtccgggcgtcaacgccttgaagaacaggtcgaacacgtccccgccgtacccgccgtgagcccagatgaccctatgccgctcgtggtcgacgaccacggtcaggtacgtgtggcccttgcggtggctggtctcgtccacgccgatcgcgtgcaggccgtcgaacggcgggggcatcgccgttccgagccgttcggcgaccctatgggcgatgtctcccgcgatcctccacgcgatatgcagaaatctggtgaataagcttttgctcaggcgttcttcgtgattcatttctttggtcggaaaacagaatacgcgggaacgccccttacgcttacggaaccaacggctcgacgacgaactgacatccacgaaaacagcaatagcgccaaaacttgccgttccgttcgtcaatcagaccgtcataattgtccgcacctgaatcatgcagacgccaggaaccttgtcaaccctcaaatccgtatatcgttcacctgcgcaacaacctgcagcccgaaccgcgctctccagcaggttgccgagaataaccgtcaaatcgatcgacttagcaaagtgttccactgggtcctcgattcgtgacgtgaaccggaccccagcacgttccgcctcatacgcgtaatactgcaacagtgaatccaattccggattactggcaagacggtaccgcgtactcggaggaacggttcgtaccattttggcgatgtaatcacgtaattcgctaagctcattcttctcagccaataccgacaacaccgcaagctcatgacgaaaatcatgccgtagccgccgttcggcatcactatgctcccggtagatacggtaagcgcgttcatgcaattcatattggcgattgacgatactcagctcattccgttgacgttggacgagaatgattttggcaatgataagatacgttccaagtttcgttatgaacaacagcatcagcatcataaaattagccggcttcgcagtgctgatgtattcaggttcaggcgtgccgaatcgcatccacaatgcgatggcgctgaatccagccggaaccaaccacaagtaccgccagatataatccgcatcctcaacatcgaacaaatccagcaacgttcttccgaagaatacgaatagtacgcagatcagtgcaatcccaaccagcaagaccgtgagcaaatatcgccaatcatataccccccccaggaaacagatgacgatcgacggcgttgcccatgacagtaaccgtgcccgacaggttcatgaacaacatcagaacaaacacaatcttgcgccaagaatcacgaatcaaaccgatcacaggaaatccccataacaccggcaacagtatcgccatcaacgccatgtacgcgttgtcatcgacatggctatagcgcaatgagccggctaccacctgaatcaccacaagcaatgcgcatacagcaacggtggcgcgtacgcctaagcggaggcgtttgcggaacagcgtcagcgtgaatgccatgccgggcagacaatcaagcaacgcgaatatcccggccccgcatacgcccacattcatttacctgatccccttacctcaatccatgtcgaatctcttccggcgctctcaaacctccatcactttacatgcacccttcgtctcctccgtccggcaaatatccgcaaaaccatcgtgcacactatctttgaaaaacatgacccgcacgtcaggctgacccgtataataagatgcgctgtcaagccaatgtgtggcaaaccggcaatgttccacgtctcggcgtcgtatgggaagtcatacgaacgataggacaccacaaggaacgtcgggggcattggacgaacgggggctgggcccttcgtatcgttttctgtccgaactccgtccgcagcatcaatccctagaaaacggtaaagcaacaggattcaagggaaatcgcaaggaatgaagaagacagtcctccacaaagcaatcgcacttctcggcgcaatcaccatgcttgccggcgtcgccgcatgtgggcacagcaacaatgccgacgaatcgggaaatggtctaaaaaaagtgacgttcatgctgtcatgggcgccagacaccaaccacatcggcgtctacgtggcgaagaacaaggggtacttcaagcaggtcggccttgatgtggacatcgtggcggtggcacaggccggcgccgaacaggcggtgaacaacggccaggccgatttcgcgctgtcgaatctgaccaacgtgggcatgtacaccaccaagggtgccacgatcaaacaggttatgcaggtgcagcagaagccaagcgccatctggtgttcgctcgcctcgaacaaggcgatcgaatccccgaaggatttcgatggcaagaccttcgccacgttcggctcgaacgaatccgacgcggtgatccgccgcatgatccagacggacggcggcaaaggcacgttcgacaaagtgaccgtgggcacatccacattccagacgctgtccagcggcaaagccgattttggcgggttctacgccacatgggaaggggtgcaggccgatatgtacggcccgaagctcaactgcttcaccgagccggattatggcgtgccaggcaacgccgacaccatcggcattatcaccagcaacaagaccatatcctccaatccgactctcgtaaggaagttcgtgcaggccaccaagaaggggtatgaatacgcctactcgcatcccgatgatgcggccgcaatcctcgtcaaagaagcccccgacgcgaatctcaagctcgctttcgtcaagaagagcatgaagaccatcgtaaacggccagtactggggtgatccaacgaagatcaaggatggctcgttcgtgttcggcacgaacgacaccaagggcgcgcaacagtatttcgatttcctcgccaaagaggacgcctacaccgattcgcatggcaagacagtacacaccgtgccggtggccaagaacatctcgaccgacgaattcctgaagtgagtctgatgtccgtcaaacgcaagctgattctcgatgtcgataccggcatcgacgacgcgctggctctggcgtatgtctccacgttcgacgacgtcgagttgctgggagccatcggcacctatggcaacgtgacagccgatacagccgtgcggaacacgcgatatgtgctggattggctgggattgcggcatgtgccggttctcgcgggctccacgcatccatcatgggccgattccttcatcgcggacgcgggatgcgcgcaattccatggaacggacggcctgggtggattcgggccggcagcggacccgtctacatccgattcggcgggagcgttcacgctaacatcgcgtaggctgatttccgtaggcggctacaacgtgcacgaccgccatgcgaatccttccaccgattcgctcacgctttcattcaccgcatgcgaccgtacagaaagcacgcctgcctcgccggaaggcgtacgattcatcatcgacatggtccgccggtacggcagggacgtcacagtggtggcgaccggaccgctgagcgacatcgacgcggcgctcaccgcagcgccggatatcgcggacggattacggctggtgatgatgggagggacgctcacccaagagggaaactgctgggatgcgaccgccgaaacgaacatcatccaggatccggaagcggcggatcgtgtgttccattccggcgcggacgtgaccatggtaggactggacgtcacacaccagtgtctgctgggaagcgacgcgaccgcacagtggcgccagcaggctgcgccgaccggcgtacggacgttccttgccgatatcgccgatttctcgatcgcagcgaatcttcatgcggatgcgcgtctcttctcggcaggcatgccattgcatgatccccttgccgcggccgtcgcattggatccaagtttggtggaatgcttcgatctgccgatgaaggtcgagacgcaaacgggcgatttccacggcacacgcggccgcaccgtcggcgatccggccggcctcatcgacccggccgtgccccgcgtacacgtcgcactgaccgtcgatcataaccgtttcgtggccgacttcacccgtagaatcgccggcatccggcgttgatgtgtgttgttttggacgaaatccggtttgatttcgtccaaaacaacacacatcaacgccgcggcacacgtgcctgctccaatcgatatgccaaaacctgggcgttgtccaaatccctgtagaacatgcgcaccatatctacaccgcgcctacttaggcactgctgtcgatcgcgttcatcatcgacgacctgccgaatggtccgccccgcagtcatcaacggatccacgtacttctgaaccccgtcgaactcccccgcgatcagggtgccgtcatctcgttcccagagaaaatccacccgatgcacacggcctggatggctcaggcaggggaactcgacctgaaccctatgcacaggaaaccccaattcgtccaaaacggcacggcactccgactcaccaccgttttcaacccttccatcaccttgggcaagtacggcacgaatgcgttccctgtcccgaagcatgggaatcgcatccacatattccaacatctgctccacggtggttttcccctgccgcaaagcggaatcaatcggcgccatcgcatagcgacgcggcatcatcgcagcgcaatcgacaagcgtacgaaggatagaggtcacgcgcgcaccatccacagccaccgtttccgcatcatccaacacatggaacctcacatacctctgattcctcggacggctgtttctgccaaccgcgacatgaatcggatgcaactgccggtacgagcaatccaaaccatgcatgaccgccgcgctcgcgccgcagaacgcccatcgctcatgccattgggatagcgaacggagaatgtgccgaagccgctcatgcgggtcgagccgatcccaatattccttgcctgcatacagaccacgatgcacccggacaatgctcccctgcttgactcgacgtacgaccaccttgatgtccgtatcccagaaaggacgcatgcaacaccgatcccgctgcgccttcgcaatcaggagattcagagaacaatgagtttccttttcgcccatccgtgcagtttagcggatgttggggaaaaaggaaaatgtgtgcttattcggacgaaaaccggtctgttttcgtccgaataagcacacattgacgggaacaaataccccctacttcttcacgccaccgaaacgacgatcgcggtggatgtagtggtcgatggagcgccacagcacatcacggccgcaatccgggaacagttccggcacgaagtcgagttccgcgtaggcggcttcccacggcaggaagttggacgtgcgctgctcgccggacgtgcggatcaccagatcgcagtcgggaatatccgggttgtacagatgctcagcaatcatcttctccgtcacgcgatcgccagagatcttgccgtcacgaacctcgcgtgcaatcgctgcgcacgcgtccgcgatttcggcgcgaccaccatagttcaggcagaacaccacgtcgatggtcttgttgttcttggttttctcctgcgccacttccagctcgtcgatgacggatttccacagcttcggacggcggccggaccagcgcacgcgcacgccccactcgttcatctgatcgacacgacggtggatgatgtcacgcgagaagcccataaggaaacgcacttcctgcggcgaacgcttccaattctccgtggagaacgtgtacagagacaggtaacgcacgcccgcttcgatggcgccggcgatggtgtcgaacaccaccggttcggccgcctgatggccgtcggtgcggatgagtccgcgctgctgggcccaacggccgttgccgtccatgatcacgccgacgtggcgcggaaccttgttctttggaaaatcgggaatgatcgacggatcagaaaacggtgccgccggaatgtcaagggatttgtaatccacgttctcaaaagccatacccgctaatctagcaagcgcatggaacgaatcggccgttccaaatagtattcgccccattcttccactatttggtgggtttcccgttgaatcgacgcggccgccggaacaccgtccagctccccccaatcgccatcgacaagcgccgaaagccggcaaatcgcatcccacgacaccgcttccgattcgggggtgtggtcggcggcgcacatcaggccgccggcgggaatcgaaaaataccaggacagcgtggacgaaatcggctcgccgcacaccacgcagacgcgcagacggggtgtccaaccagcgatcgccagtgcgcgcagcacgtacgaatcgccaatcgtggacggctcgtgcgcatgtttggcaagcgcgttcaacgcgcccaataccagccggtattgtgcgaccgcaggctccttttccgtggcgaccagcttgtcggcggtttcgcagatcacgttcgccgccgtatacgcttgaaaatcggcgcaaatcggccctgcatacgcggcgatcgattcggcttgggacacgacgtcgagcgaacggccttccgcaatgagcagcgccacgcgcatgaacggttcgagtcggcctccgaaacgcgatttggtacggcgcacgcctttcgcgacggcgcgtactttgccatggtcacgtgtgagcaaggtgagtatgcggtcggcttcgccgagtttggcggtgcgcagcaccacgccttcgtcttgatacagcggcatcgcacctccttttcttgccgttcatcgcatcctgttatgcatacgctcgccgcacgtgcgcgttccgagatacattcgccccgtcagtagatgaacagcccccagaacgcgaacaccagcaatacgcagaacatggcggccacggtcagccagaacatcacgcgtccgaaccgcgtggaagccagcaccggctgccgtccgctgacgatttcgccgatagcacccttacgtggcggccactgcgcgatgcctcgatgggttgcctcttcgatcagccgcatgaacacgcgggaccatgcccacaccacggcgacgcacacgatctggatcaccggccagctccaatacatcacgcccggattctccactggggcactgccccatgccagtttgaccacacccatgatcacatcgccaaggccggcgcagaacagcacgaacgtggccatagtggcgatagtcaacgtgaccagcgagtttttgaacccttgcgcaagccccagccgataccgtcgtccgtgggcacgcgcccagatcttacgcatcagcacggcgagccacagcacgcctgcggcaagcagcagcaccagcatgctggcatgcaacgcgaccaggtagatggtcaggccgcgattggctttgaggtccaatggcactgcgattgactggtacattctggtgccggccacgcgttcgctggtctgtttgagtccgtgcgtggtgccgacggcccagtcgaccacatcgtccacgtacgcgtcggcgaacggggttccggaattggcttcgtcgccgagcctcagcacatggttggcgatggggtacgtgcgtatggtgacgtcccagttgccggcctggtgagccagatcgacgattttctccgtgccttccacctgcgcggtcatgacgtctttcgtgccatatgccaccaatgtcggaatggcatacgctttcggcgtcaacgtgtcgatgtcgaggttggtgagtccgaacagggacgcgtcgatattgaatacgcggcggacgatcgactggtagccgtcatgcgcgccgacgagcgcgaagtcctgtgcggcgaggaagcccagcgaataccgcggctcgtagaccatcggactgagcagcacctgaaaagcgacgtccggatcgcgctgcagcagatacgatgagatccatgtgctttcggaagtggcgtagatgcccactttggaggcgtccaccgtatccattttccgcaggaggttgatgacctggtcgtagatggcggcggaacccgggtagtcgcgattggcgtcgttggtggaccagaccggcttgtcaagcaccgccgtcacgaatcccgccgaagacaggtcggaggccatgtcgccgaaggaattgtcgcaggtgccatagccggcgccgtgcatgaaaaccacgccgggacgtccgttcccagcccctttcggtttgcggatcagcactttgatgttctgtatctcaccggtggaaggccgtttcgctttgatggtgacgtaccgtttcgtcacctcgtaatcgccttttttcgccagtttttcgccggatggattggcgaaggtcacggcggtgttggcgtcaagcgtttcgatggtctgctcggtcggctcgtagttccatgtggatgccgtcagattggccacggacaccagaatgcccagcagcatgatgaaaataggcaggttgaccatgagccgccgcccgcgcgtccacggttgatgttgcggttgcggacgcgcgggcgatgaagccgattcttgccgtaatgattggctggcggctgatgattgacgttcctgctctgacacgccgctcattctaccggcctttgctgagaagcctgcgattgcatgctaccgacggcacgctggaacatggctttcagcagttgccgttttgcgtcaccggcacgaccaccggaccggtggcggtggcaggcacctggccgtcggcctccatctgcgcggcgatctcctgcgccttggcgagcagggtttccacgatctggtcttccggcacggtctggatgaccttgcccttgatgaaaatctgccccttgccgttgccggaggccacgcccaaatcggcttcgcgagcttcgcccggaccgttgacgatgcagcccatgacggccacgcgaatcggcgcggtcacgtccttcaacccttcggtcaccgcgttggccagctgaatcacgtccacctgggaacggccgcaggacgggcaggagatgatgtcgaacttacgcgggcgcaatcccatgtattccagcagcttgcagcccaccttcacttcctccacgggaggcgcggacagtgaaacgcggatcgtatcgccgatgccttcggccagcagcgcgccgaatgccaggcagcttttgattgtgccctgccaggtcgggccggcttcggtgacgcccaaatgcagcggccaatcgcccttggaagccaacagacggtacgtctgcaccatggtgaccacatcatggtgcttgacggaaatcttgaaatcgtggaagccaacgtcttcgaacatgcgcgcttccttcatcgcggacgccaccagcgcctccggtgtcgggccgccgtatttggcgtacagctccttatcgagcgaaccggcgttcacgccgatgcgcagggaaatgcccgcatccgtggcggccttgcagatcgaagggccgacctcgtcgaatttgcgaatgttgccggggttcacgcgcacggccgcgcagccggcgtcgatggcctggaacacgtacttgctttggaagtggatgtcggcaatcaccggaatcggcgattttttgacgatttccggcaatgcgtcggcatcatcctggcttggcacggccacacgcacgatatcgcagccggccgcggtcagttccgcgatctgctgcagggtggccggcacgtcagccgtcagcgtattggtcatggattgcactgaaatcggcgctcccccgccgaccggcaccgggccgaccatgatgcggcgggacttgcggcgcggatgcagcgggctttcgctgatggccgcgtcaccggttttgcggaacggtttttcgatttctggcatacgtgatccttgcatgtgcgaggcgcgttatgcgccccgcgatggttcttacgattgcttgtgctctttacttgtttatcagcttgtcggcgcgggcgcgagcctcctgctcgagtcggctcatttcctccacggaagcgaacagcgggttgccgcgcagttcggcgtccatctcgtcaagcacttcgcgcacggtgtcgacgatgccgaggtatggcagacggtgttcgaggaacgcgtggacggcctgctcgttggccgcgttgagcacggccgtatgcttttcggacgattcgaggcagtgccgggccaggttcaccgcggggaacgcctcgttgtcgagcggctcgaacgtccacgtggccgccttcgtccaatcgcatgcggcggcgacgtttccgagacgttccggcgcggacaggccgagggcgatcggcaggcgcatgtccggcggcgaagcctgcgcgatggtggcgccgtcgcggaattccaccatggaatgcacgatggattgcggatgcacggtcacgtcgatgcggctcggtggcacatcgaacagtcggcttgcttcgatgacttcaagacctttgttcatcagcgtggacgagttgatggtcacgaccggccccatgttccatgtggggtggttcaaggcctgttccggcgtgatgtcggtcatttggtcgcgcttccagccgcggaacggaccgccggacgcggtgacgacgagcttggacacttcgccgtgcgtgccggaacgcaacgactgccagatggcggaatgttcggaatcgaccggattgatctgcttgtcgcgtacctgcgcgctaaacagcaggtgtccgccggccaccacggattccttgttggccaatgccagctgggaacctgcctgcagtgccgcgatggacggttcgaggccgatggagccggtgatgccgttaagcaccacgtcggcgccggagcctgccatggcgatcaccgcgtcagggccggctgtgatgttgacgttgcctgcgccggcctgttccaacgcctcacgtagcgcggggacggcttccttgtagaagatcgcgacggttggcacatggactttcgccgcctgctgcgcaagcagttcgacatgtgctccacccgcggcgagacccgtcacggtgaagcggtcgagatgacgtgagatgacgtcaaggccttgggtgccgatggatccggtggagcccagaattactacggttgatggttgcatgggttatgcgctgctctccgtatgatatgccgatgttccggcattggttgggactatgtaagttgggactgtgtagtcgaggctgtgtagttgggattgtgtaaacgcgagaacaggctgacgattccgccagcctgtttattaccgttggttcactcgaaggacgggaacgacagatccggaatatcgagattgtcgtcgttgcccgacgccgggaaaatcgacctgaaagccgggcttggttccggctttttgtcctcctgctgcttgtccgcatcggattcggcggacggttcagttgccgggccaactgccggttctacggcaggttcagccggagcggccggctcggccggagcctgttcaacaaccggagccggagtgacaattgggttcgaatccggaaccggagcggccggttcaggcgtgaaggatggcggcaccgaggctgcgagggagctcaggctcgtcgaaccggtggtgacctgaggcaagtcggacgcggacaggctcggaacctgcggcgtgaacgtgttttccgtctggttcgtctcattgatggtgtgggccagatgcgccaacgcggccaaagacggatcctgctgcggctcgggttcaaccggagccggcgggaatgccggagcggctggagcctgcgaatcggtcgcggtcggagccggagcctttggcgcggcatcttccatcgcatcatcggcaagcggatcgaacgcctgggtctcttcaacggcgctcggcgcggaagaagcggaatcggtctgcggctggaacaccggaggaaccaccggaaccgcaggcggagtgttcgtcggcgtggcaggcacgctcaccggggaggtgaccgcggacgtgaagatctcatgctcggccttgttcagcgcgtcgaaggaatcctcttcgctcggcgtgacggttggcacagtaggaggaaccggagcagccggaaccgtggcggaaggagctgcgaacagcggtgcgatcatctgggtttcgccagctgcggaatcactggaagccggggcaacggacggtgcggccgcggccatcgcctcttcggagggttcaccgacgaaatccgcgacgcgcgcatacgattcgagtcgggtcagcaactgcgcgcaggcggccagatagtaatccacctgacgttcgtcatatcccctcttgcctttgcgctgagtgaagatcacgttgctcaaggtctgggaattcgtgtcggcgatcgccttggcgtccgtttcactgacttcctcgacacccagctcgccggcggctttcgtcaggcacttgtcgatcacgctgtcgacctgcttgcggtcgtagctcggattcttgccctcgcccggcttgaaccgttggccatgctcgcgttcggcatgcgcgtcgagcttcttgaacaggtcctcggtctgcgccttccatgccacacggccatgctgggagatttcccacgtggtctgcttgtcgaccacggcacgttccagacgggcaagcgcggcatccacttgggcgatcacatagccgcccttgaccagttcgaaggagacgttctgaatatcatgctgggtgagttgcgcgccctcaccttcatacagcatgtgcgcacgttcaaggaaagcatccacctgttccgcatcgtagccccactttcgcttcgcggcatgagcgattcccgatgcgttcttctcggtttcaggttcctgtgccattggcgttcgacctcctgctacacgtattaacgtcactactttacgtgattgattcgacgcagacgccgcaaaagatgaaaattcagtgaatcgacacgtgcggctcatcgctcgcacggcggtttcgtaccgatcaagcggcatcatatccgccatgccgacacacgagtgcggctcatcgcgcggatacggtacagtagttcgttgcgggcgattagctcagttggttagagcgccacctttacacggtggatgtcgggggttcgaatccctcatcgcccacttttcgcaacgccgtgaaaaatcaaggaatcgcatatcatcccgcgtaatatcagcgcgcgcacccgtgttttgcccacattccgcccacgttttgtttgtgttttgccggaaagtccacgtaatagcaaaatcccccaaacccaatgggcccgggggattttcgtatacgcgagaaaatcgcgaaaagtcttggtttacttgcccttgccgaacgcgcgcaggtgaataccgttccaatcggagctgacggtcagcggagtggcggcattcatgccggcggtcttggccgcggactgcacggtgctggagcttgcggcacccggacgtcccggcttcggggtgagcacccacagcgggccgtcatcgccgagaaccgcataggcgtcgacaatggtgtcggccagttcgtcctcgtcatcgccatcacgccaccagatgatcacaccatcgactgcggagtcataatcctcgtcgaccagctcctcaccggtcagttcctcgatcttggcgcggatcgagtcatccacatcatcgtcccacagccattcctgtaccaggtcgccggcgtggaaaccgaattcttcagcgttatcagatgccgtttgattcacgttcgtcaatataccaacactgctcgaacatatacgttacgaacgccggaatcgcccacttttcgagatgaaacggcgatttccgcctgtatcacgcctatctccttccgccgcacgctcattgcttgacggtgcattgcggcagtgaaccgcctttaccatcgcggatggcgaccagcgcgtcgtacgcctcgtccaacgtgcccaccttcaccacgtggaggccctgtggcacgtgcccaaccacgtcggagcagttggattccggggcaaggaaccacgtggccccgtcacgcttcgcgccgatcatcttcaaccggatgccgccgatcgcgccaaccttgcctttggcgttcatcgtgccggtacccgcgatggtcttcccgccggaaagctgctctccggtcaccttgtcgatcagaccgagcgtgtacatcatgcccgcggacgggccgccgatgtcgtcgacgtgcatggacaccttcataccggacacgtcataaccgtgcgccttgaggaaccgcttcgcggccgtggccgcggcgttctgcgatgaggacatctccttgttgctttccttcgcatagtccttggcgctttgtccgacggggaacacggcctcctgcggaatcaccgtggccttcggattggcccatgccagcaacgcctgcgcgttggtcacaggatatccgggaacgcctgaggcgttgacggtgacgagcagtagtttgccggagtccttatgcgtcttcacgccggacacgtcgatgacctgcttgccttcgacttttccgagcacgtcctgggtcggtcccggctcctgcaccacgtacgcgctgggcgcaataagcaccagcacgcagagcacagccacgatcggtccggcgagatatcgccaagggcgaacatcgaaccaccgtccgacctgacgccaacgtcgtctgatacgtggcagaaggccttgagacgacccgttacgtgtgcttttggcgtgaactcgctgtgtttcctgcatatcggccatgcctcccatactatggaaggcaacgaacttaacaatcgcgtggaacaaaggcaggaaacggtatggatgagaatgcgatccgccagtggcttatcgattgcttcggaccgattcagggcgagatggcatggaaccagctttccaacatgccggaagccgtacgcgaccagctgatgagtcaggatccgagcacgctgcccaagcccgaagaggtcaagtccatgatgcaggcgttcaccgccggcggactcaacaccatgggagatatgcagcaggccgtggaacaggggccgatcaacatcaaactggcgaaatcgctcgcgttgcagcaggcgaatggtgccggatcggacagcagcgtgaacgccgaaaccggcgaaatcgcaagacgtgccatcagcgaggcgaacctgtggcttgataccgcttgcgagttcaacccggcgcaaggcgagacgcagctgctcacccgcgccggctgggtggaggacacaatcgacgcgtgggcgcagttcgcctcccccgtggccgaatcgatgaacgacgctctggcttcgattctgtcgcagcgtttcggcgacggcgaaatccagaccgagatttccggggttttcgcaggccccatcgaaattccgattccggacgagatgaagaatccggcgaagctgatgcgattcgtcggcaacacgtcgttcgccatgcagttggggcgtgccgccggcgacctgtcccatgaggtgcgcggcagcttcgatcagggcatcgcgctgctgaagaatcccgccggcggactgatcgtgcagaacgtgaccgaatacgcgaagtcgctggatatcgacgtgaacgaagtgatgggctatcttgcgctgcaggagcttgcgcatgccaggctgttcgcctccgtgccgtggctaatgccccgcttcgaggcgctgctgggcaaatacgcgcgtggcatcaccatcgacatggatgccatggaggagcagatccgtgaggcggagtccatcgatccggattccatggccagcgcggtgaacatcaccaaggtggcgttcccggacactccggagcagaagcaggccatgaaggcgttggagaatctgcttgccttggtggagggctgggtggatgccgtcgtgtggcgtgcgggcatggcgcatattccgcatatcgaacagcttcgtgagatgttgcgccgcgaacgcgccatcggaggccctgcggaacgcacgttcgaaagcctgatgggcatgcaattgcgccccaagcgcatgcgtgaggcggccgcgctgtgggaaagcatcggcgcgcaggaaggccccgaggcgcgcgacgcgaaatggtcgcatccggatctgctgccgcaactgccggacgagcagtccgaggatagctccaacgaagagaacggcgccgcatccgccactaccggtacggaacagaccacggcgcaacaggatattccggacagcatcgattgggatgccgaactgtccaagctgctcgacgaggaagagcacaagggcgatgacgccgacagcacgaacgacgccgacggcacagatgacgccggcgatacgaacgcttccggcgacccgcagtcaccggaagaagcgtgatttcctgcgcccgcgatcggacccatcgtcctcgcgggcgcgcgcataggacacgtcgagcgtgtcttcggcacgcgtgaccgccacgtacatcaatcgccgttcctcttccagaaggtcgccttcgggcggtgaaccgtatggaatcagcccttcggagcacccgatcaggaacacgtgtttgaattccaggcccttggaggcatggatggtggagatggtcacgcctttaacgtcgccgcctgcgccaagtgcttccaacatggccaagcgggtctgagcgtcatccgcgagcccggagttctgccatccgctgtctcgtttgacgcggtagcgcaggtgttgttcgtccagtgcccggcagaggattttctgctgcgcgttgactcgggtgaggatggcgcagtcgcccggagatgctccctcgtccacgagtctgcggatgcgtgcagccacgccccgggcttcttcgagatcgctgttgtagacggtttgcgcgactcggcggccttggtctcgcttggagttgagtttgagatagtcggcgcgttgcggtgagacttcgagcacgcggttggcgtagttgacgatctgcggggtggaacggtagtcgttgttgagtctgacgtcggcggtgaggggtccgaattcggaggcgaagttgagcaggttgtagctgctggctccggcgaacgagtagatggtctgtgccgggtcgccgaccacgcagatgttgcggttgtcaccgagccatcgggtgagcagccgatgctgcaggggcgagacgtcttggtattcgtcgacggtgagccatgtgatgccggagcggatgttggccgccacgtcttcgtcgctttcgatgaggtggcaggtgatgagcaggatgtcgtcgaagtcgatttcgttgcgattggttttttcggtttcgtatgctctgtagatgtccacgaattggcttggttccagtcctgccggcggctggtggtggatggccgcgcagacgcgttcatagtcttccggcgcgatgagcgagattttgcaccagttgatttcggcttgcaggttgcgcacggtgtcgtcgtccacctgctgggtggtgactcggcgtagggaatgttccacgatttcgcgcggattgcgtgagatgaacggcatgggcccttcgcatacgtctggccagatccgacggagttggtgtagtgccgcggagtggaaggtggcggctttgacgtcggatgcgacgtcgagttgggatagtctgttgcgcatttccgcggccgctttgacggagaaggtcacggcgagcgtggcgcgcggattccatgccttggtggcgcatgcgtaggcgattcttcgggtgacggtccgcgttttgccggcacctgcgccggcgatgatacggacgggtccgcgcacggcggtcgccgccatgcgctgcgcatcgtccagtccgtcgagaatcgcttccgctgttgcatccatatgctccattgtggcagattgcgtgacgagacggacgtcatcggcgcgattaaccgtgaattcgtggcaagtcgcgcccttattagccttcagtgtgtattaaggttggaattgtgaccgaacgaagcagatttatgatggccgccttggcgagcgcggcgatgccgaacgccaccatcgctggcacgcgtgacagcgagcaggtcaacgccaccgacaaggggtatggcattgatcatgccgtggtgcaggacgccgcgggcaagttgtatgacacgttcgcttcgaacacgccgaagggacgcaaacgtctcgttggtcgcgtgcgtgccgcgcagacgttgatgggcaaccgcgagttgggcggattggggttcgacgtcgatcgcgttctggcgttctccaacggcgaacaggagaggtccgtcacaggagacgtttccgtgatggtcgccacgcatcatgatggtcaggcgcgtccgctgacgctgctgacgttggacgactgtgccagcgtgggcaccgcgttgggcgcgatacaccgtcttcgtccggattttctgcaggaggccggctatccggtgttctccacggggcagattcgcgcgcagctgaccgcatggatcaagcgtttgcgtcaggctggccatgtgccgcaggagatcacgacgagctggtccgacgttcttgaaacggacggcctgtggtcgttcgccacttgtccggtgcatggtggcctgtccgacggcgatgtgctgttctcgggctcgtcgatcaccgccatcacgaactggcaggatatgcaggtcaatgatccggcacgtgatttggcgtggattttctccaaacttgacgaaaaccaccgtaatgcgttgctcagcgcgtatggacgcatgctgggcaatcgtttggacgatctgatcatgctgcgcgccaacctgtggctgcagatggaacaggtgggcgatttcatcagcgcgttgaatcaggccgatagcgtcaagatcatgcagttcaaggcgcaggtggagcgtttggctcaccagttgggtatgctcaccgcgaagaaccataggccgagcgagacgcgtcaggacgagcagaaggccggcaaccgtccgccgagcaccatcaccgtgggcacgttgctggacgaatcggaacgtcgcaggcaggcggcggcgcagcagaataacgatgccgacgcgaccggcgaacgtcatatcgacgcgaccgatatggatgatgacaggaccggcgatttcgatgttaccggctcccagcccgtccgtaagacgaagcagatcgtcgatgacgccacggaagcgttcgatgtgactgccgccgaacatatcgtctccgccggcatggtttccggcaatgccgattcggacgatacgagcgaacgtgaggaatcccccgtcagcacgttcgttccggagcagtccgcgagggagcgtcacgagtcgttgccgtccagttcgaccattgtgatcagcacgttgcagaccgccgatggcagcgatgacacgaacgaggaggaaattcctcaagcccatagcgaagcggcgaccatgctcattccgctgctcgaacgcgatgaggccactatgcagaaggccaaagcggaggtcgaccggctgcaggccgaggacgccaccgatgagaaaccgcgcgtagaataagcgcatacattgcaaacgaatttgcacacgaacacccttacaaggagcatcatggatatcgaactgggcattcagaacgtggcgcgcaccgtcaccttcagcaccgagcagagcgccgacgaggtgaacaacgtcatcgccgaggccgtggagaatggcaagaccatcaacctgaccgacgacaagggccgtcgcatcgtggtgccggccggttctctcggctatgccatcatcggttccgaaaccaagcacgccgtcggcttcggcaatctctgatcgccacctgcaaacgcgttggacacgttccaaatgaaaaagacgtcggaccatatcaggttcgacgcctttttcatattcgattcatgtatccggttcacgcttggaaattccatatccggatttcatgcggcatgtgagctgccgacgcgaccgatcaaatccacaccccgatgcaggatttcgcgtacagtgtcgtcgtcggtaaggttctcgcccagaccgttcggcttgcctttgccatgccagtccgagccgccggtcaccagcagatcgtgccgtgcggcaatcgtcagcaatcgttcccgctgttccggaggattgccgcgatgccatacttccaagccgtccaagccgtcggcgatcatcgcgtcaagctgctcgtcggacagcagccggcggttgcgttgcggatcgcccgcatgcgcggcgaccaccacaccgcccgcccccttgacggcggcgatgacctcgtgcgtcgacggcgacggcgtgggaatgtaatacttggatttggcgctcaccgcgtcggcgaacgcgtcggaacgcgtctcgtacacgcccgccgcgaccagcgcgtcggcaatgtgcggacggccgattgtggtgcgctccccttccttcacttgggcgagcacatcgtcccacgtaatcggaaaatcctgcgacagccgctcaaccatgcgtttcgtacgccgcaatcgcgccgcacgcgtgttggcgaacatgctggaaatatgctcgttggacggatcgtattggaaggcgagcatgtgcacggacacatcttcgtcgacggcggtgatttccgtgcccagcagcaacggcaaatcgatttcctccgaggcttccgtcgcctcgtcccagccggcggtggtgtcatggtcggcaatcgccacaccatgcaagccaagcttccttgcctgctccaccagcgtgcgcagcgtctccgtaccgtcggaaaagacggtatggcaatgaatatcccaaccttgtgcgggtggttccgcgtaactcacgtgactcatatgactatcgtaagctcgaatccgcggtttttcgcgtagactgagacatgacaacgtttgtattttgattttccaaggattgacgatgagcgattttgaaggccaggccgctgtggacgcagccgatgacgaaacgagcgtcggcacagccgtcgccatggacgacgactgcacgaagccgcgcgggtggcgtcacggcgcaacgtggacgtatctgatcatgctgctcgcttcggcggtggcattgctcgtatcgttcattctgtcggcggacacgctgaaaatggcacgcaatcccgggcagaagctcaactgcgatgtgaacgccgtgctgtcctgttccacggtggccgaatcctggcaggcggaaatcgtgaagttcgccggattgagcttcccgaacgcgttcttcggcattgccgccgaatcggtgttcgtgacgatcgcggtgatcggactggccaagatggccgtgccacgttggttcgcgctgtgcacgtggcttggaggccttgccgcgttggcgtattcgtattggctgaccacgcagtcgctgttcgtcatcaacgcgatgtgtccgtggtgtctggtgctgatgttctccaccaccgtgcagttcatggcgttgtcgcatgccacggtggccgtgcaggatatgccgtccggtcatgctggattgcgcaagtattaccggctgaatttcgatctgatggtcgatgtggtgtggattgtggcgttgatcgtggtcattctcgtcaaggacggcccgatgctgttcgcctgatacggtttgcatagaaccttttacgatgaaggccgaccctgcgtggccggccttttgcctatccgcttttcgtttgctgccgcagcggttacagcagttcgattttacccacgatggtggcgctgccggtaagcttcacgtcttcgtcggtcacgtcgacgcgcaaggtgccgccacgtacggtgatggtccaatggtcgatgccggttttggcacgcaacgtgatggcggtggcgcataggcccgtgccgcacgacagggtttcgccgcaaccgcgttcgttgacgcgcatggtggcctcgcccgcatcgtcgccttcgctttgctcgtcgatgcgcacgaactccacgttctggtccgacggaatctcgggcgcgacgaccggcttggtgaccagatcaaggtcttcgacgttcggcaggctggcgaacgcgtcttcaagtacggccacgacgtgcggattgcccatgtccacgaacgtgccacgtgcggaaccggacgtgcccggaatggtcacttcgtaaccgtcgacgtcgccacgcttccatgcgcccatctccacttggaacacgtccttgccaaggcccggcacatcgccgagcgaagtcaggatcttcacgccggcgcgggtgccgagatggaatggcttgccgcccggctggtcggcgatgccctgccgctgcgcgaacagcgtgatcgcacgcgtgccgttgccgcacatctcggccagcgagccgtccgcgttgcggtagtccatgaaccagtccgcatcgcccgccgcgcaatcggcgatctgcctttcgttcacatcggacaccgcctgcggatgcgccagacggatcaggccgtcgccgccgatgccgaaatggcggtcgcacaggaatcgcacttcatcggcggtcggctcgtgcgtaccgtcttcgtcgagatacaccacgaaatcgttgccggtggcgtgcgctttgtaaacaatgcttggaatgctcataccagttcactctacacgcggtaggctattgaaagcgtttggcgtatgcgcctgcgggcatgcgcgcgatggcaaaggaggacgtatggcttcaacggcacctatcggcgttttcgattccggtttggggggtatttccgtggcgcgtgagattcgacgcgacatgccgaacgagcatgtgctgtatttcggcgactccgcgaacgctccgtacggcacgaaatcgcccgaacaggtgcgcgaactgtccgacgtcattgtgaaacgattcgtggaacaaggcgtgaaagcggtcgtgatcgcctgcaataccgccacttccgccgcagccaacgaactgcgcgacacatacgacattccgatcatcggcatggagccggcattgaaggtggcttgcgaccgtggtcacggcaagcgtcagcgcgtcatcgtggccgccactcccctgacgttgcgtgaacgcaagttcgccgtgctgatggaccggttcaaggccgatcatacgatttttccggagccctgccccggtctggtggagatcgtggagcatgggcagcttgacgaccatgatgtggtgatgcgcacgctgcaccagtatttcgaccaatacgatctgtccacgatcgactccgttgtgctcggctgcacgcatttcgtgttctaccgcgattatttccgagaactactgcccgatacggcggcgatcatcgacggcaacgaaggcactgtacgtcatcttggcgtggtgctcgaatcgttgggcaagctcgctccggaagacgcggaaggcggcatcgagctggccaattccgacacttccgcacgaatcgcgcagttggcgcagtcgctgcttgatcgctgagcgcgaatgtcccgacagaccgcgtaaagtcgaatgaaacccggcaaaagggacggacttgcgaaaggacgggcgcatatggccaacaggacagcgatgatcgacgtcggcggcggtttccgcgcgatttacggcgcgggtgtgatggaccgcatgctggaggacggcatacatgtcgaccattgctatggtgtttccgccggcagcgccaatatggtttcctacatttccggacagcacgggcgaaaccacacgttctacacgcagtacgcgttccgtaaggaatacgcgagcttcgacagctatgtgaagaaccacaattacgcgaacctcgattatgtgtacagcacgctgagcaaccacgatggcgagaatccggtggattacgaggcgtttgcggcgaatccgaccgaattcaccgtggtggcctgcaatgcggacgatggttccacgaagtatttcgacaagtcagatgtgggctacgacaattacgacatcatgaaggcgtcatcggcggtgccggtggcgtgcgaaccgtatgtgatcgacggcgtcccgtattacgacgggggcatcgctgatccgattccggtgcagaaggccatcgatgacggctatgaccgcatcgtggtgatcctcacccgtccgaaagacaccgtacgcgaacagaagaaggacatcggcccggccacgattctgaagcgcacgcacccggaggccgcggaaaagctgatgaaccgctatcagacgtacaacgacgaggtggcgttggccaaggaatacgagaaggatggccgtgtgctcatcctcgcgccggaaagcatgtacggcttgaacacgctgagcaagtcgttcgaaggtctggaacgcatgtaccgcgccggatatgcggcggcggccgcgattccaacgttcttggaaagctgaaatccgttcttccgcagcgctgtcatgcgtttccaacggccctaacggcaaccgtatgacagtgatcgcatgacagcaatcgcacatacgacgattacatggcagccgtcatatgtgcgttacggcatcgcaacacgcgtaaccgggcggcggctatgctggaacgcatggaaaagcagaatcgtattttttccggctttgatgccgatgccatcgatcgcaccaccgccgcagatctggccgaagtcggttccgacaagtggacccgctaccccggctgtatcggcgcgttcatcgcggaaatggactacggcctggcgccgtgcatccagcaggccatcgacagcgcctgcgaccattgcaaactcggttacattcccgaaccgtggaagcgccgcgtggccgaggcgtgcgccggctggcagaaaagccactacggctgggacgtggatccggacatcatccgcgtggtgccggacgtgttggaagcgtacgagatcttcctgcgcgagctggtcggcgccggcaatgccgtggtcgtgccgacgcccgcgtacatgccgttcctaagcgtgccgaagctgtacgacgtcgacgtgatcgaaatcgaaatgcttcagggaaccgacgaaacgaccggcgagcgcgaatggctgttcgatttcgacgccatcgaacacgcgttcgtggctggctgccatgcgttcgtgctgtgcaatccgcacaatccgatcggcaaggtgcttacgttggccgaggagcagcggctgtgcgagctggcggaacggtacgacgtgcgtattttcaatgatgagattcacgcgccgttcgtgttcgaggggcgtcatattccgtatccgaccatcagcgaggcggccgctcggcagtctatgaccgctaccagcgcgtcgaagtcgttcaatattccgggtacgaagtgcgcgcaggtgctgctgacgaatccggcggaccgtgagatgtgggcggaacgtgcggagtggagcgagcatcagaccgccacgatcggtgcgatcgccaccaccaccgcctacaacgagggcgatccgtggttccaggacgcgctttcctacgtgcgacgcaatcttgggttgttcgatgagcagatgagcacgcggttctcgggcgttggctatattcgcccacgcggcacgtatatcgcatggctggatttcggcccgctcggcattgacgatccggccgcgtatttccttgagaaggcgaaggtggcgctgaccgacggccgttcgtgcggccgtgcgggagccggctgcgcgcgtgtgaacatggcgatgccgtatccgctgctggaggattgcctcaaccgcatgcatgacgcgttgcaggcggacggtttgctttaaagttttccgtctttcgtgtgtgaccgacgctatggtcggccacacacaccatattgcgggaaaagccgccgaatcattgcgattgcaacggttgcgctatgggcgaatagcagcatgttacgatggccgcacaccaccgtcggtggacgcgcgacgcgaatccagcgtatgcgtttcattgagaagaaggctttacgaatatgcgattcccctacagcggcaacggcacatggacgcccgactaccactgcggtttcattgatgccgtcaaacgttttttcatcggctacatggagtttcgggggcgttccagcagacgcgagttctggctcgccatgctgttcttcattccggtcagcgtgctgatattccttattccggctgccggaacggtgtccggaatactgtggatgctggccaccatggtaccgatcatggccatctccttcagaaggctgcatgatgccaaccgcaccggctggtggtttctgcttgggcacgtcggcaccattctggcccttgcgatgctggtcgtcattgcgttcggcctggtcatcatcgaaatcggcatgatcatggtcatcccccacgagccaccgaaactcgactttcatgacccgaacagcttcccgggaatgctgctcacgctgttctatgtcagcctcggcatggccggcatctcgctgatcatccaagcattcctgtactcactgcccagcaagcccgagggcgtccgcttcgactgatgttctcagcggcatcccgcccctcttccctccctgcattaccctcttagcccttttgtatggaaacgttccatctcacattaagacagagcagtgagctcggttaacaaaactcctataatcacatctattgtctttccgccgtcataagcgacggaatgtcaacatcagaggagaaaacaatgaagagaaacatgctccaccgcctggtcgccatggccgcggcgggaaccatgctgatgtcggtcgccgcatgcggctcgtcatccgataacaacgccaccaccagcaattccagcgacacctcgctgatttccgtgaacaacagcgagccacagaacggtctgattccgagcgacaccaacgaaatgggcggcggcaaggtcatccgctacctgttcgaaggtctggtgagcttcgacgcgaagggcaagcagcatcttgaagtggccgaaagcatcacaccgaacgaggacgccaccaagtacacgatcaaactgaagaagggttggaagttcaccaacggtgaggctgtgacctcccactccttcgccgacacctggagtttcgccgccaatgtgaagaacgcgcagaagacctcgagccgcttctccaccatcaagggctatgacgagctgcaggatccgaacgtcgatccgaaggccacactttccggtctttccaccccggacgactacacgctggtcgtcgagctgaacaagcctgattccgtgttcccgaccaagctcgcgcaccaatccatgttcccactgccgagcgtggcatttaaggacatcaagaagttcggtcaggctccgattggcaatggtccgtacaagttcaagtcctggtcgcatgacaagaacatcatcatcgtgccgaacaaggattataagggcagccgcaaggtatccaacaacggcatcgaataccgcgtctatacgaatgaggattccgcttactccgacgtgctgtccggcaacctcgacgtgatggatcagattccacagtccgcggtgaagaccttccgtcaggattccagcgtgatcgcctacagccaggcaggttcttcattccagtccttcgtcattccggaacgtcttgagcatttcggcaacgacgaggaaggccaattgcgtcgtcaggccatttccatggccatcaaccgcgaccagatcgtcaagaaggtttacaacaacacgaagaccccggccaccgatttcacttcaccgctcgtccccgaatatgtgaagaagctggagaagaacggcgacaacctgaagtacaacgcttccaaggccaaggaactgtggaagaaagccaatgccatcaagccatggtccggcaacttccgaatcgcctataatgccgatggcggccataaggaatgggtcgatgccgtgtgcaaccagatcaagaacacactcgacatcgacgccgctggcgagccgtacgccacgttcagcgacgtgcgtaaccaggtgaccaaccgcaccatcaaaaccgcgttccgtgccggctggatgctggattacccgtccgctgaagattatctcaatccgctatatgcctccagctccgctgacggtcatggttcgaacgatggtgattacaagagcgcggaattcgacaagctcctgaacgccgcgctcgcccagaccgacgtaaagaagcgaaccgaggacttcaccaaggcgcaggaagtgctggccaaggatcttccggtgattccgctgtggaacgacaacgtcgccgccgcgtccgcgacgaacgtgaagaacgtgtcgttcgactacaccaacctgcctacctacaacaccatcaccaagtgacggcttcgttgtgacgttttgctgccaatcggcaacgaaaaacgagtgggggttcgaatccttaatggattcgaacccccactcggcgttttgcagccgtttcgtttatttgcttgcggcgtcaaacctatggcgtcagctctgcacgtagctgcccttcggggacttccaaccgcagttcatcatctcgctgttgaacaccatcgcaccgtcgccatgggcggggacgacgatcatgccaccgtcgccgtggtgacgggccacaccgtccagcgcggccttcgcagcctcgaccggatcttccttggcatacagcacacggtcggaaacctggtgtgcggcgacttccttgacgaacgcctcaccgatgccggtgcaggagatcgcaacggaatcgttgttggcgtaggtgccgcaacccggcagtggcgaatcgccaacacggcccggcatctggttggtgatgccgccagtggaggtgccggctgcgatattgccggacgcgtcacgtgcgacggcgccgatggtgccatgcttctcccattcgtcgccattggactgcgcctcacgcagggattcctgacgggccggggtgatgaagtactcgctgtcgcacagttcgatgccccactccttgagcaggttatcgcccggcttggcgaacatgacgtgcttggtcttctccttgatggcgcgcgccacattgatcgggttcttggacgtggtcagaccgcatgcggagccgacttcgccgtcaacgccggtcatcaggcaggaatccatggacacgatgccttcgctcgtcaacgcggcaccacggccagcattgaattcgggagcatcctccatgacacgaatggccgcgcagacggcatcttcggccggagcgccctgttccagcagcgcatagccggcttcaagggccctgttcagatcctgctccacctgggcgcgacgttccggcgtgtccttcttgccgcgattgccagcgcctgcgtggatcaccagaaggattccatccggatcagcctgggcaacccggaccgtcgactgcggcaatgctgcttcgtttgttgacatcttctctccttcagatatctcgcttatgtttgacattcgcagatatcttacgccggttgcggcaacgaagcgcccgacatgcgcaaaagcgatgccgtcgcgccgttacgcaatcaaaaacatattgaagcgcgactgcgtcctttcttacgtttcatacttttgcaaatcgtaatctcgtatttcatggtgctcctccgttggtagtgccagtatgtgtcaagcgcatcgttccccggacaaaatcacgttcttaagcaaagccacgcttgtaaatcggaaacacaagtcgttgtggcccctacggattcattgtatgtcgaaatggctgaataattatccatcgcaaaaactctcgtaagcaacacctatcgagataaatgtagcttattttaacgttagctacacttatgcggataagtgtagctaacgtacatgcgatgcgactgatagattggcaaatacaatcatccccgcatgtgcggggaacacttgaaacgctggcgcagcttgttttcgagcgcgggatcatccccgcatgcgcgagggacacctgccgagtggctggtagtcctgcatgtcgtggggatcatctccgcatgtgcggggaacacggtgccgtggtggtagaattggattgctcgaagatcccacgcgaccagctttcaagactggaacatcagtcggggggttatcttcgggttttctatttcagttggatctgatgcagtcccgatatgtagagcacccatagctcgcggatatgcgtttcgtaccgttggggatcatccccgcatgtgcggggaacacgcgaacgtctgcgttttcatgacatatctgcaacaaaatctattagcttatcctgaacacttatccatgcttcagaatccaatccaacattggttttcctgtttttctcttcgtcaattttgcttttgtctggcggggtgccatgatgccctccaaccacgcaggcatactgacgtgcagcttttctccccccaacctcggactcgcaggagatatccctcaagaataatctctcctgcgatgggatgtgtggtgatatgaactgatttttgttccgcatttcccctaactcgatgggagatgatggaaccatggcaaaaggaacgagatacacgccggagttcgaggcgaaggccgtcaggctgttgaccgaatcgcgcggctcgtattcgtcggagaccaaggcgatcgaacaggtcgccaaggatctgggggtcgcgccggagacgctgcgccgttggcgcaacaagacggacgccacggtcgcggcggagaccaagctgatatggcccgattccacgtacgcacgccatgtttcttagtctatgcacatttgcccctccgatggatcatttccgcgcacgaggggaacaccatgacgacttcgagctccctgtgttatcgcaagaactatccccacatacgcagggaaatgttgccacgaattctgcttattccaatgccacacgtttatcgatatgccgcttgaagctgtttcacatgttgtttgcggattttcctatcggtgatgttgagcacttagagtttctgcgtgatgctttcagggtcagagctattgcaaacagtttttcttggagccaaccttctcaaataagtattacttaattttccattagttacatgtatcgtgattaatgtagctaagtgccgaaggcaaatacaaataacggcgtgcacttattgcataggagaccacaaccccggcaaggctattgggaaaataagtgaaaggaccgaggctgcagctttacgtttctctaaatggctatttagaggaactgtgcgagtgtcttgccgctcatgaatcgggcacgaaaactgagattatgcagctctgtagccttgtgtcagagaaggtaccatgtaatgaggcagttctgaatacatatgtctccactgaatcgcttttgtcggataaaagaggcagacaacgcgcgtcttccctgcctcggacagggaaagtgaccatttatcggtccagtgacgtactgatttcaaacattcgtccatatttcaaaaagatttggttcgctgattgcgatggaacctgctctggagacgtactggtcttccgcgcaaagaatccgttactcgctccctacctatattcgatattgcatgcggattcattctttgaatttgtcatgaaaggagcaaaaggcacgaaaatgcctcgtggcgacaaaagacaaatgctcacatatcaagcagctagctccccccgtcaagacacgattgcttcaacaacaattttgacagaacaaatcgcaataaatgacagggaaaatgataagcttaccgctctccgagatgtaattctccccaaactcatgtcaggagaaattgacgtatcaaagattgatttcacgcagctaaatagccatttagccgaacattccagcatttcaggcaaactgtttccgttatcaaccttgaagggaacagttatggagaatgccatccaactcattcttgcccaaatgcagtcagttctgaactcgcctcagctgaaacgcctgaaaaccgttcttacagagacgttgcctggtggcaaaacagtcaaagacgattcggaattgttgccgctttttctcaccgcgaaagaggttgaaggatgttcgtccaaaaccatcgaatattacagaagcacgctcagccttatgaccgaaaccctcaccaaaccgtacacgcagatcgaaagcgacgacttgcgcaagtatctcaacgattacgaggcatcccgcggtagcagcaaagttaccatagacaacatccgccgcatcatgtcgagcttcttctcatggctcgaagatgaagactacatagtaaaaagcccggttcgccgcatacaccgcgtcaagactgtgcaggtcgccaaagaggttctgaccgatgaggatcttgaaaccctacgaaacacctgtgatacaaagcgggaccttgcggtgatcgatctgctggtttcaacgggcatgcgtattggcgaactcgtcaaactcaacatagaggatgtgaacctcgccgagcgcgagtgcctggtcatgggcaagggcaacaagcagcgacccgtttactttgatgcgagaacgaagctgcatctagaggagtatctgcacacaagagctgatcatgctccggcgttgttcgtcgcccttgactcaagcgcacgccgtgtaactatcggcaatcttgagcaacggctgcgcaaacttggcaaatctgccggcgtatgtcacgtccatccgcataagttccgccgcacattggcaacccatgccattgataaggggatgcccatagaacaggtgcaaaagttgttgggccatgccaaaatagacacgaccatgcattacgcgatggtcaaccaaaacaacgtgaaagcttcgcataggaagtatttggaatgagactcggggatatctgcagcaaaatcggtagtggcgcgacacctcgcggagggaaagaagcttactcgacatccggtattcccatcattcgaagtcaaaacgttcttgattggtcttttagctccaatggacttgcttaccttaacgacgagcaggcaaaaacactttcgaatgttgaagtacatcaaggtgacattcttctcaatatcaccggtgattcagtcgctcgtgcctgtattgtgccaagtgacgttatacctgcaagagtaaatcaacatgttgcaattcttcgtcccaaagaaaaagcaaatgcgactttcatcctcgcttggctgcaaactaataaagaccttctcctcaagcttgcctcttcaggggctacacgaaatgctttaactaaaaggatgcttgaaggattagatattaatctaccttccatagatattcagaaccatattgcagaactcattagccttatccaatcaaaaataaacttaaacattaagctaaatggctatttagctgcatgagatcaatctttgatacgtcaatttctcctgacatgagcttgggaagtaacctgtcacgaatttcttccaatcgtttattttccctctgattcgcaacaatgagttcaaccatagggacggcaatcttgttgaatctatttaatgttttatcatccgggagcacaagtctcattgtcttaacgtaatcacgaggtagctccgtctgacccgtgctgcccgtatgcaaagattcaatgtgtttttcgtgcttgaaagcccaaaaacctaaatatagcgcataccgggggtcggcagtgcggacaattgttatatgtgaatcagccactagttttttaggttcaaaccatacttgtgcggttctgccgagtgagccaacaccagttgagttaataagcaaatcatattttttcagccatttctctgttttcttacggggagcgtgcgttctgccattctctacaagaataagattgcttcgaacacaggtctgtccaagaacaacttcatcggagacatcgctatatttgggcgcaattccacggcaaaccatgccagcaatcttagcaatctccgcccaacgccagtttcgaggcaaaattgcatttttgtcattttcgtactcgcaataaagggttttggcataagtcttcaagtattcgagtaaatagccatttagctgagtattgattctttgcttcgtataaatcgaatcaagtattgaaaccacttttcgctgtgtctcgatgtgaggaagttcaatttcaattcgagacacatcagcaggatggacacgaaatactttcatacctcttacataccgacgaagctcaccgataaaacaaggagaactcataaggtagttgagataggcaggtataacaagatctctgcgtttaacacggacaatagtcgtctcagtacccgaaacagcaagcttattttgtggattgttgaaaagataagcatgtcccaaatcatcaacagtttccgaagtaagcacatacacgatgtcctgatctttaaggcactgactttctttaaccttttcaccgcggagaataaacggaataggttttgatggactttcaacatcaatgcgcaggtcaaaccctttataaaggtcaccataatggatatagaggtaatctccggtgtcgtgcatacgggcacggggaatgctcgctccacgactaaagctgcaaatatcgccaagtacgactttacatcccatacccaattgcctccagattcttcttgatttgctcttgcaagcggctggattcctcaaagcacttggaaatctcaccagttagccgcttcattttctcttcgaatggttcaccgtcatcttccggttcggcaatgcctacatagcggcctggcgtgagaatgtagtcttgcttggcaatgtcctcagttgtggcgatggcagaaaagcccttctcctcttccagtgttccagcacggaatgcgtcgaacgctcccgataccttggcgatgtcttcatcggtgaactcacgcagtttacgagaaaccatggttcccatgtccctcgcatcaataaacaaggtcttgcccggctgggccttcttgtttgtgattatccacagactcacaggaatacccgtgctatagaaaagcttatcgggcatggcaatgatgccttcgaccaaatcttttgcgacaatgttggctcgaatatcgccttcaccgctcgtttgacttgataaagcgccattggcaagcactagaccaatacgccctccagccggctgcagatgatgaatcatatgttgcatccatgcaaagttggcgttgccttctggcggagtgccgtaatcccatctcgggtcttctttgagcttatcccctccccaatctttcagattgaatggcggattggcaagaatgaaatcgaatctctcgttcttatgcagatcattaaagaacgtatccgcattatgatcgccaagatcggcgtcaataccacggatggcaagattcatcgtcgccattttccatgtagtcgggttgctttcctgcccgtatacggacagatcagaaatcttgccttgatgccgttcaacaaacttggccgactgcacgaacatgccgccagacccgcagcaaggatcatagacccgcccatggtaaggctcaataatctcaaccaaggttttcacaatgcaggccggcgtatagaactctccagcattcttgccttcagcttccgcgaacttggccaagcagtattcataggtgcgtccaagaatatctctgctgtcacctttatccgccatctttacgttggtgaacagatccacaacctcgcccaagcggcgcttgtcgagctcctgacgggcaaagttcttggggagaatattcttcagcttatcgttctccgattcaatcgaacgcatagcctcatcgattaccttgccaacctctggagtgtgcgcagcggcggcaatcacattccaacgtgcattttcaggcacaaagaaaatattctctgccatgtactcgtcgcgatcctcttcaaagccttcgccttcatccacaagctcctgatgcttctgatcgaacttgtcggagatgtacttcaggaagatcaggccgagaaccacattcttgtattccgaagcatcaatgttgccccgtagcttgtccgcggctttccaaatctgctcttcaaagccgatttccgccgtattatcgtttttcttcttcgccatttcctgttcctactcttcaatcttggtatcagcccaaagctcgcactgcttcatcacagtatccatggcatcatcgacgccttcaggcggatacttgtattttcgcagcaaacgtttgatcgcacgccgcattccagcacgggcactttccttcttctgccagtcaatcgtggcacttctttgcatggtttcagtcaactcacgcgctatagcaaccaactggtcgttgttatagaaatccttgaccgcttgaggtttggtaatggcatcatagaatgccatttcctcatcattcagtccaagcttctgggcatcatcacggtctttcataatgtcacgagccatttgaagaagctcttcaatgacctgcgcattggtcagcatgccattgagataggagttcaatgtgttttgcagcatctcgctgaatttctgtgctttgaccacgctggtccgctgataggcacgaactttctccttgatgagtcgtttcagactctcgacggcgatgttcttttccttcatgccagcgatttcctgaagaaacgcttcatcgaacaaggaaatctcaacactgttcttgtcgaaaaggttgatcacgccatcagcgtgaacggtttgctcaaggatgtcgcttacacgcttgttgaattcggcgtaggtcatgcctccaccaccgttacctttacgcccggtaaggcgaagtacctgaacacgcaaaaccgacaaataagctgcttcgtgctggtcctcttcagaaaccaggctcttgcataggctcaatgcctggttcatcagttggcattgcttgaggaagttttcggtatcttcatgacgcttcggctcaagcagccaatcggttccttcggcaatggcatctgccaaagcctctcgactattcgtaaaaatcaatttcctgtagtcgaagccatacataaggtcgcggcatacatcaagtttttcaacaaatttcgggtaagccgtcgcagcaatatccatattgctgtaattatgctgatctcgattcgtatagtccttcattgcttgcttaagagctccggcgatgcctatatagtcgactaccagaccgccttccttgcctttgcaaacacgattcactcgggcaatggcctgcatgaggttatgacccttcatcggtttgaaaacgtacatagtcgacagacttggtacgtcaaagcccgtaagccacatatcaacgacaatggcaatcttcaatggatcgtcatcatctttgaacttccgctccatctccttcttatgcgtgctacctccgcacacgtcgaaccattcctcgggatcctgattcgacatggtcatcaccacaccgattttttctttccattcagggcgtaattccaaaatcttgtagtagattttcatcgcaatcgggcgactatacgcaacaataagagccttgccggcaagcacatcagcacggttgttctcgtaatggtcaacaatgtcacggcagagcgcatcgatggtttccggagtatcaaaaatcgcatcaagcccgccaaggtcatgcttggatttctcaatacttgcttcatctgcttgatcagcaaattccctataagcggcgtcaattcgcccaagggctccctcatccagatgcagtgcgacaactcgactctcataataaaccggtttagttgactcatcttcaactgattgagtcatgtcgtacacatcgatgtagtcaccaaaaatctcacgagtattacggtcatccgtcgatatgggggtacccgtaaaaccgatataggaagcattcggcaaagccctgcgaaccatacgagccgcgccaatactcaccttgccattctcatcgatggtttctgtgagtccgtattggcctcggtgggcctcatccaccatgacaataacgttgttccggtcgcatagcggttcatctccatcagagaatttctgcatggtggtgaaaataatgccgtttgcttcccgcccttccagcaattccttcaaattctgccgactttcagcctgcaccgcctgctggcgcaggaacttcgcacatctggtgaactgaccgaacaactggtcatccaaatcattgcgatcagtaatgaccacaatcgttgggctctccaaatatttttgaatcaaatgtgcgaagaacaccatcgacagagatttgccgctcccctgggtatgccagaacacgccaattttgccatctccagcaaccgcatcctgagcgcggacaacagcttttttcacggcaaaatactggtgatatgcaccaagaattttgactattttttcagaagtatcgttaaagcacacgaaattctgaataatatccaacaaccttgcttttggcagcattccatcaagcatggtcttccacgaagcgttcttcgtttcggaatagtccccatcgacagacttccatgccacgtaacgatcctcgtccgcggtaatggtaccaactctagtttcagtcatatcgctcattacgcagaacacattcggcacaaacaagctcggaatctgcttcatgtactgacgaagctgcaaataagcgtcagacgcatcagtttccacacgtgacggcgacttaagttcgaaaatgaccaatggcatgccattgatgaagataattatatcagggcgcttctctgaatattcgacaaaagtccattgattgacaacttggaacacattgttttcaggatggttgaaatctagaaggcgaacgatttcattccgttcttctttaccatcaaaataacggacttccacaccagactgaagatagtcattaaaaatttcattccgctgctcaagacttccaccctcaatattcttaattttgagaattgcctcatcaattgccttcgcaggcaacccttgattgacattagacaatgcttccgggagaacatcaggaataaaaacatcttgataattctcagaagaacgacgaacatccggaccgaacaaatgctcatatcccattgaatccacaagatggtcaatgatcgtatgctcataccagtcttcatcgataatcatggagtgattcttgccaagaacagattcaactaacgaactgtccatcatgcgcttctttgccatatctactctcattcaccgatatccggaaaaccatccaaaccgattgtacgctaccaagggggttctactgccactttgcacaccggcgtcggtacaaacaacttgaaacaaatcacttccgcccctcccaatctgcatatgtatcattatctttggtcctccactcacgacgtccattagcagtcgcacgtccttgtacaaaagcagcagcggcagaaggcgaagagaaaggcacatctcttgtcaaagtcgcaatccccttatcatcgataacgattgctccctcattgtttaatcgttcatgaagctgtttccgtaattcaaactgcctgcgagtactttcgacaacattgtccttacgcgttacttctgcagcaatcgcagaccctttaagcacagtaaattcaccatcaataatttgcccataagcagtacctccatgtttctttaccgatacttggaatatcggagaatcatattgcaattcttcccctgccttcaatgcatcatcccattttgatgaacgaccgcgaaacacttctaccccaagtaccggcagaatcgtcagaaattccttaatgaaatgattcatatccgaagcatctgcttccggcaaatccgcaccccctgtaggctcattgccgttttccaaaggaatacgtccaatctccttagctctctggataagctgagcctcaatgtagcgagcatgtgcactagtcaggttgccatcttttgaagtgacaaacactacttcagaccagaatgatttcttggccgcatgctgttttaagcgacttgcaatattgtcgctttcaccaatataagccaatggacttccatcacttttgtcaccaagcaggatataaacgcctgtacgctgagcttcttcgcgttgatagattcgaccaagttcactgcggctgcctttaaacacatggccagtccagttcatgatttctgctgtaactaaaccactaaaagttccatcaatcagaaataacctgatctgcttaccttctgccataatgaccagcttcctcccatttacagcgattgtatcggtccgaacatcagaaaacactcattgacacagtgccatcaggcagcgtgaacccgctacatgcgggaacaaaaatatagttattccgccgcaacggacttgtatacttactcgtatacttcaagcaaactataaggtgaaacatgtcggttacatcgattctcgacaatatgatttccgtcaccgatctcaaccgcggtggcgcaagcaaaacactaagccgagtcggtaacaaccacccagtcatcgtgctcgacggcaatcggcccagcgcggttatcattacccccgatgactattggcgcctcactcaagcggaagaggatttcgcactataccaagaagccatggaccgcctacacaatggcgacggaacacaattgaccgacatagacgtattcggcgagcattaccattccgtcaacgacggttttgaaccagaatttgaataaggcttgcaacaacgccagtttcgacaagattttcagacagcataaggagaacacatgcggttggaaatgacgggaagctttgatgccgatgggagtgcggcatcatccaatgacctgctgttccttggattccacggatacagcaacgatgaatcgggaatggtgcgcatcatcaacgcgatctgtgcaaccggcagtcccgacaacacgcatcacgccaacgccaacggaaacggcaacgtcaatagcaataccaaccgcaatcccgctgccgacccacccatcaagcccaactacatctcattccgcggcgcatatacgcgcccatacatcggcagccactactggtatcccgacggatgctccgtcagcgagcgccaacatgagtgcagccaggtcggcgccgaagtggtgtgcatgctgcaatcgccggtattccagcgtttccgcaaggtgttgatcggtttttcacagggcggatacctgtcgtatcgcatgactacggagtatccggacgtgttcgatatggcggtgttgctcagcccgtcattcaagggggaaacagcggacacgatccctgccggccgcacacgattcgcgctttgctacggcagtgatgaccgtacgattccaatcgccgaccagcagtgtgcccgtgagcaacttggctcgaccggtcgttgcacgtatttcgaatatcccggcatggcgcacaacatatgtgatcaggaaattgccgacgtgcgcgcctggctgggattgtgagccatggcgagtactcacataccatgcgtaattggaatcttgccaaagaacgctcactagagctgataagtgtagcttatttttgcgttagctacatgcaatcggataagtgtagcttaattccgcattagctacatgtatttgcctatagaaaaagccggacggtggattcctggatccgcccgtatgggcgaacccgttgaatccgccgtccggcggcgcgactgtttctcaagaatgtgtgcttgactcacatggatggtactgagaaccattcgcttaacgatctgcttccatgcgcgccaaccgtgtacaaaacgcggctgcgcggcacggacacaaatcaagtcttgcgtggctcgagccgcggtgggcaacgccacggcggctcgaaagccaagggattactctagccgcagcttggaataatcgcaagccgaccaaacttcggttcaggctttggcgacttccacgctgagctcgggtgccttccttcacgtcgaaggaggtggcgagcgtctcggaggtgatgagatccttgaactgctcgaccttcgccacgtcgccggccggaacggtcagcttcagcgcgatatggtcggagacctcgagaccggcggccttacgggcgtcctgcacggagcggattacgtcgcgggcgtagccttcggcaaccagatcgtcgttcagctcggtgtcgaggatcacgaagccgccggtcggcagggccgcggacacggagttggcggcctcttcggcgttctgctcctccacgctgttgatcagctcgtactcgccctcttccagcgtaatgtcgccgttcggggtctcgcacaccggagcgccggaagcgtccacatgccatgcgccggacttggaggccttgatggcgaactgcacgtccttgcgcaggcgcttgcctgcaacgcgggcgttcacgcgcagctcgtggatgatcttcaggccctgggagcccgcatcctcaagcgtgcacagctccacgtccttgacgttgagttcggacttcagaatctcgtcgtacgcggccacggcggcggtatcctccaccaccacggtgagcttgctcagcggctggcgcacgcggatctgcttcgccttacgcatggacagggtgctggagacgacctcgcgcaccttttccatggcgttcaccaaagccggatcgtcgacgagcacgcggccaagttcggtggcttcgccggtcttctcgtcggccaggaacggccagtcggccagatgcacggattcgcctccggtcaggccgcgccacacggattcggcttccatcggggcaagcggcgcaaggacgcgcatgaacacctcaagcacggtgtacaaggtgttgaacgcgttggcgtcctcgttccagaagcggtcgcggttgttgcggatgtaccagttggtgatcatgtcgatgaagtcggacacggcgtcgcatgcatcggagatcaggaactggtccagcgaggactgggtcttttcgaccagtcggtgggtacgggccagcaggtaacggtccatttccggcagcgatgcaacttcgtcggcgcgaagcttgcgcgcgtcgtacccggccgcgttcgcgtacagcgtgaagaagtagtaggaactccacaccggcagcatgacctggcggacggtgtcgcggatgccatcggcggtgacgataaggttgccgccgcgcaggatcggcgagctcatgaggaaccagcgcatggcgtcggagccgaagtcgttgaacacgccgttcacgtccggatagttgcgcagatgcttcgacatcttctgtccgtcggagccgagcactatgccgtggcagatcacgttcttgaacgccggcctgtcgaacagggcggtggccatgacgtgctgcacgtagaaccagccacgggtctggccgatgtattccacgatgtagtcgcacgggaagtgctgttcgaaggtttccttgttttcgaacggatagtggtactgggcgaagctcatcgaaccggattcgaaccagcagtccatcacgtcgctgatgcggtgcatgtggctcttgccggtcggatcgtccgggttgacgcgggtcagctcgtcgatgtacgggcggtgcatgttgatgttgccctcatgatcgcgcggataatcgccgaagtcggccttgagctcatcgagtgaaccgtacacgtccacacgcgggtacttcggatcgtccgaaacccataccgggatcggagagccccagaaacggttgcgggagatcgaccaatcgcgtgcgttcgccagccacttgccgaactggccgtccttcacgttgttcggaatccagttgatctgctggttgagttcgagcaggcggtccttgatcttggtgacggccacgaaccaggagctcaccggcttgtagatcagcggggtggcgcaacgccagcagtgcgggtaggagtgcacgtagctcttctcctggaagaggatggcgcgctgctcttcggggatgcgggccagcgggccgtcaccggcgcgcaggttgcgcaggatcggcttgttggcgtcgaacacgtacatgccctcgtaatccgggcacagcgacgtgaacttgcagcccgcgtcgagcacgtccacgctcttgatgcccttggcgttgagcgtgttcatatcgtcctcgccgtagggggcctgatggaccaggccggtaccttcaacggtgtcgacgtagtcggcggtgaagatctggtagccttccggccccggcaccttgccctcggcggcgttctcgtcgcctgcgaagtacgggaagaccgggtagtaacgccagccttccatttcggcgcccttaagctcgcgcacgatctcgtagttctcgccaagttccttctcgtaggagccaagcagcggcttgccgaggtagaacttcttgccagcgaacttgccttcggtcggacgcacctcgacgtagtcgatgtcagcgccgaccacgatggcgaagttggtcggaacggtccacggagtggtggtccagaagacggcgtaggcatcctcctcgtcgcgcagcttcacggccacggacacggtggtgtcctgacggtcctgatacacgtcggcgtccatgcgcagctcgtgcgcggacagcggcgtctggtccttcgggcagtacggcagcacgcggtagccctggtaggccagacccttgtcgtacagctgcttgaaggcccacatcacggactccatgtacgtgatgttcagggtcttgtagccgtgctcgaaatcgacccaacgggcctgacggtgcacgtagtccttccactcgttcgtgtacttgagcacggacgcgcggcaggcgtcgttgaacttgtcgatgcccagttccttgatctggtcgacggagtcgatgcccagttccttctgggcttcaagctcggccggcagaccgtgcgtgtcccagccgaacacgcggttgacgcggtggcccttcatggtctggtaacgcgggatgacgtccttcgcgtaaccggtcagcaggtggccatagtgcggcaggccgttggcgaacggcggaccgtcgaagaagacgaattcgttctggctgtgatcgccggaaggacggcgttcgatggacttctggaaggtgccgtccttgtcccagtagtcaagcacggactcctcaagcttggggaagctggggttcggcgcgacattggcgctctgctcaccggcagcagccttcggatacacatgattggtggattcgctcaccgtatgctcctcgtttggcggtttcattacttactttacgaggacgatgattttcgtgcgattgcgcacgtccgacaccgcggtaccacctcgcttgccgcactcccctgttttcttacgcaggcttccctgcacaggtttcatacgaccgcttgacgttcggctgttcgggccgatcccgccggttctactaggccgcacccaaaagcgccgaccgttcttccggaagctccccgctgataacggatcattgctatacgtttcaaatcgtcagcctagcacttaccacgaacgtaggaaacgcgaaaagccgcatggcgtccaccatgcggctccttcagcgcgacgattgaaattcaatcgcaatcaaaagcgaatcagccttcgttgagctgagtttccagctgctcgacaatgtcagcatgcatcttctcgctgatcttcaccttgagcaggaacacaacaccgctcaggatgatgacagccagcggcacatagaaggcgcagaccttgaaagtgtggatgttcgcggcagtcatgtcggcggcggtggcgtcaccaatcatgccggcggcgatggcgacagcaccgacgataccgttggagcaggcgcctgcgatcttatcgagcatcggacgcacggacagggtgacggcctcgttacgtttgccgttcttcagctggccatattcgatggagtcggtcagggagaggatggcggtcatctggatgaaggtctgcggcaggtagaagaacaccaggccgacggtgacgacagcgaggttgttggtgccgacgatgaacagcaggtagccgaggaccatgagcaccataccgccgaggtacaggtagcgacgcggtatgcgcttgttcagaatcgggtacagcggcgccatgatgatgccggcgatgaccgagacaacgccgacgatggagtaggcggcggagttgttcaggatgaacttgaacatgtacatgagcacgccggtggtggccacgttggcgatggcgtacagcaggtaggacagggcgacccacagcagctggtcgttctgggcgagagccttgaacgcggcgagtggaccaccgttatcttcggccttggcgcgcagggtgctggtgctttccttggtgccgaacgcgacggagcacacggtgaggacgccgagaatagccacgatgatggcgaagcaggtccagccactttggctttcctggtgcttgccggtgaagacatagctgaagtaggtgacgatcgggatgacgacgatagtcaaaccgttgtaaccgatggagccgccgaaggagccgagagcagtgtaagtggagcgctcgtgggagtcggaggacagcgccggaatcatgccccagtaggaaatgtcacgcagggaatagaacacgtcaagcacgatgaacgtgatgacgaacaacacgatgaacagtgtggtgttgacgtttaccagaccgaacagaccggtatagacgagcacaagtagaacggcggaaacggtgccgccgatgagctgccatggcttgaaacgaccccacttggtcttggtgttatcgatgatgttgcccagcagcggatcgatgaagatctccgcgatacggatgacaaccacaaggccggtgataacgccgatgagcttggtagcgagcgccttgtcaacgccggagaacagcgagctggtgacgtagacgatgaagtaggtgctcagcgcgttgtagaaggcggattggccgacgttgccgaatgaataggccacgcgggacagcagactgcctttcctggttggcttcgcagactgctgcgtctccttcggtgcggctgcgacattggattctgccatcgtacttctccttagaagttgtgattgaagctgtaatcggaaatcatcatttgatttcgcatgagttaagtatatccctttacccctgtttagtaaaatttaacatctgcgttgtgcactattgggcgtgtcgcattttgtgcgattctgcacatatacatgtcatattgtgtgcgattcgcggtatttcgccgacagtagacaaacaaaaggcgattgatgacgcagcatcatcaatcgcctttcatatttttccgcacatacgtacgctaggcagcccgtttcgaccgggcagatcgcttcgatcgggtctgcaattttggccgcgattcacgtttcggctgcgccggcacgaaactatctcgcacttccagcgtcgtcgacaggtacgcatgctgccgtactgtgcgcttgctggcaatcgcatcggccaaggtgagaatcgcaacgcgcgcaagctcgttctggtcgattgcgaaagtgctcaacggtggcgacgtaagctgtgcgatcgtctggttgttgatgctgatgacgctgatgtcgcggggcacaatcacaccaaccgcgttgaacgcctgcagcacgccgaccgcgatgatgtccgccgaaacaataactgcgtcaggcagtgcgccgttgtggtcacggataaactgctcccccagcttgcgaccattctccacggtgaacaagccgtcagaatacaccagtccacgcaggtcgagaccataacggcccatttcacgccgaaaatatgtggcacgcccctcttcgtccacctcataaaaattcgtcagcctccccttgccgccgatgaatccgacacgcttcatgccagccttcgcacatgcttcgaccgcgtcatgcatggtctgctgtaggtcgggctgcacggaatcaaacaggttcggtgcgggattcacatcgatgaacacaccgtatggcatgacctcatgcaacttctcaaggtcgctttcggctatgacattggcgccgatagccatgaaaccatcgaatttccccttctgattcaacatctcgtcaagactgtggaaaacagtgagctccatacgctgctgtttggcgttatgttccagcgccgaacgcaaatcggcaaaatacgaatcacgcagcgtttcgtcggactcctcgttgtccaacaaggctacttcgtgcggaatgacgatacgcttggcctgggcgctgtatcccaaatcctcgctggcgcggatgatcgcgcgacgcgtctcctcacgcaccgacagcgtcggatcgccattcaacagacgcgacaccgtggcctgcgaaaatcccgtacgtttcgcaatctccttgatggtcgccatcgctccctcgccctcccatggatgcctcatcagattttagtaaaagcattactaaatccatcatattacattaccgaacgtattcttatagccatgacacagccagagcaatcacggaaaccgcgaatcgcgcatcagtccacggaacggatgaacgaactgcgtgcacaacaaaaatcctttgccctgcagaacatgcggagcaaaggactcggcaacgccggtctgcctttcaaagcgaccggtcataaaggtggcatcagtcggcagggttccaaacgcggctgacaccgtggagaaacgcggtcaccgtcagccccacgggcctgcggctggaagcgcccgcccttctgcgtggccgacttgccatgtgagccacccctcgatgacgccacgctccgcatcggttctaccggacgcgtatacatcaggcctctccccggtgatgctgcggatggaaccatgcacatatccacatttttcacggagacggttgcggggctgctggctttccatataccgtcagcgcatggaaagcttcggacacaatacatttttcacattagagcaggcacgggaggaggcggcgagacggcatcttgaatgcaggcaggtgttgtcgcggataaggtcacgctcctcggttccactctatgtaagccacggcacagcgctggagctgcatggcatgattgccaccatgaattatttacccggatatggttcggagctcgttcacgtttcggtgtgccggcaacgtgacctgcggaaaatccaggggatgaaattccattacgcaaggcatggcgtagacgtggcgcacgccgacgaattggtgtcaagcgtctccgcgatgcaggcggtctgccagattgcgccctatgtcgacgaacggagtctggtgatcgccatggattggctcacttgcgccaatcccgatttacgcgtctgcactcacgatgagctctccgactacatccggagtgcgccgcgattcattgggagcgccaaatgcagaaaggccttgcgcctgtccaaaccaggtaccgattctccgcaggaaacggtgcttcgtttggagagcgatgcctacgggctgcctgaggcacatgtcaattatgagatcattgaccacatacgcggctcgggcacgatgaaggtggatatcgcctacccggatgaccgcgtctgcatagaatacgacggaaattaccactacacccatgaccgctggatgtatgacctcgataagcggaaccggctgagggatctcggtttcactccttttgtcgccacccgcgagcatctggcttccaagcagaagctgaacgagctgttcggcatggtcgcccgcgcaatagccagtcaccgttacggcttggactagttccgtaggtggtttttcgcttccgtaggtggttgggtctgaatacccggcatgaaaacggccagaataaagcctttctccaaccccgatactctgaccaaccacctacggaacacccaaaccgcctacggaaccgcatgagtagtccccgcaatggatttttcgccattgattcggggaatccatgaaaagccacagcgggcgcaccctgcgtaaaaggtcatgcccgccgattcatgggagccatatgcgcaagggccgtgcggaagccacatatgtggcttccgcacggcccttgcattcgttgaacactaccgttcagcctgtccaattcaccaagaacgggacaggaacgaagcagaaggagccttactccagttccacggcgcccgtgtacagctggtagtattcgcccttctgcgcgatgagctcgtcgtgcgagccgcgttcgatgatgcggccatggtcgagcaccatgatcacgtcggagttgcgcacggtggacaggcggtgcgcgatcacgaacacggtgcggcccttcatgaggttgtccatgccggcctgcaccacttcctcggtgcgggtgtcgatagacgaagtggcctcgtcgaggatcatggccggcggatcggccacggctgcacgagcgatggagatcagctgacgctggccctgagacagaccagaaccatcaccttcgagcacggtctggtagccgttgggcagcatgcggatgaagccgtcggcgttcgtaagcttcgcagcggcaatgcattcctcgtcggtggcgtcgagtcgaccgtaacggatgttgtccatcaccgtgccggtgaacaggttcacgtcctgcagcaccacacccagcgaacgacgcagatccggcttgcggatgcccttgacgaaaatgccgtcgtacagaatcatgccgtcttgaatgtcatagaaacggttgatcaggttagtcaccgtggtcttaccggcacccgtggcaccgaccaatgcgatcttctgcccgggcttggcgaaccaagtaatgtcgtgcagcaccggcttgttggggttgtagccgaaggtcacgtcggtgaagcgcacgtcgccctgcagcagggtcaggcgcccgtccggcgaggtgatcgcgttctcgcgcgccttcctcgccacttccgcggccttcgggctcagcgactgcgcggccttcagggaacgggtgccgtcgtcgccttcctcacgcttccaggcccaatggccggtttcgtggtccacttcggtcatggtgcggccgtcttcgccgagctcgacgttgacgagtgtgacggagccgccgtcgtcctcgggcttctcatccatcagctggaagatgcgggacgcgccggcgagcgccatcatcaccatgttgaactgcatggagacctggccgagcgggttgacgaaggagcgcgacagggtgagcagggagatgagggcgccgagggtaagcttgcctgcgccggcgagaccgaagttgcccatgccggagagcgccatgaatccaccgacgatggcaagcagaatgtagaggatgtagcccatgttgcccacgactggcatggtcacgttgccccaggtgttcgcttcggcggaagcgtggaacagttcctcgttcttctcgtcgaaggtcttctgggtggcgtcctcatggttgaagaccttgatgaccttctgaccgttgacggattcctcgacgaaggcgttcacatcgccgatccacatctgctgcttgacgaagtagcggccggagcgggagacgatggcgcgtacgaccacgaacaggatcgcggcgaacacgagcacgaagatcgtgaccggcaccgacagccacagcatggagaccagtgcggccagtgcggaaatcgcggacgagaacatctgcgggaaggactggctgatggcctggcgcagggtgtcggtgtcgttggtgtagcggctcatgatgtcgccgtgctcgttggtgtcgaagtagcggatcggcagcgtctgctggtgtgcgaacatgtcgtcgcggatcttcttcagggtgccttgctcgacggtgacgatgagccactgccatagccagctgcagaaggtgccggcggcgtagaggcagcccatcagcgtcagcgcgcgcagcagcgggctccagtcggggttcttcacgccgaccaacggcaggatgtagctgtcgatcagcgactgcaggaacagcgcggaaccggcttgtgcggccgcaccgatcaggatgcacagcacgattgccacgacatgccacttgtattggaagatgtagccgaagatgcgcttggtggttccgggggcggccttctgcatcggcggctttgcgcccggcttgttacccggcttggtctgcatggttttttcagcgttgttcttagtcatttccgttcctcctttcacttcagttcctcaggctgggcctgattcttggtctgcgattcgtagatggaacggtattcgtcgcaggtccgcagcagttcctcatgggtaccggatgcggtgatgcggccttcctccataacgagaatcatgtcggattcctgcacggatgcgatgcgctgggcgatgatgatcttggtggtgtcgggaatctcgttgtggaacgcctcgcggatcagcttgtcggttttggtgtcgacggccgaggtggaatcgtcgagaatcaggatcttcggcttcttcagcagtgcgcgtgcgatgcacaagcgctggcgctgtccgccggagacgttggtgccgccctgttcgatgtacgtgtcgtacttgtccgggaactcctggatgaagccgtcggcctgcgcgagctggcaggcgtggcggatctcctcgtcggtggcgttcgggttgccccagcgcaggttctcggcgatggttccggagaacagcacgttcttctgcagcaccatggcgacttggtcgcgcagcacttccatgtcgtagtcgcgcacgtcgacgccgccgaccttgagcgagccggaggtcacgtcgtacaggcgcggcacgagctgcaccagactggacttcgccgaaccggtgccgccgacgatgccgacggtcatgccggaacggatcttcaggttgatattgtcgagcaccggcttttcggagttatcagagtagcggaagtcgacgttgtcgaattcgatggacccgtcggccacttccttgatggggttggccgggttggtcaccgtgctttcctcgttgagcacctggcagatacgttccgcggacgcctgggaaatgatgcacatgacgaagaccatggacagcatcatcatggccatgaggatctgcatggcgtaggtgaccagtgcggtcaggtcgccggtggtcaggccaagggcggcattattgcccgaggccacgatctgcttggcgcccatccatgcgatgagaatcatcgagacgtatacgcagaccatcatgagcgggttgttgaagctcatcacacggtcggccttgctgaagtccttgtagatgcgctgggagatgcggccgaatttggcgatttcatgcgattcgcgggtgtaggacttgaccacgcggatgccttgaaggttctcgtcgaccacgttgttgagcttgtcgtaggtgtggaacacgcgctcgaacaccgggtgcacgtacaccgccaggccgcacagaccgaaggcgagaacagggatgcacgccaggaacaccaaggaaatggacgggctgatgcggaacgagaagatccacgccacgatcatcatgatcggggctcgcacacccagacgaatgatcatggaataggcgttctgcaggttggtcacatcggtggtgagcctggtgatgatcgagccggtggagaacttgtcaatattggtgaagctgaagccctgcaccttctcgaattcgtcatgacgcaggttcttggcgaatccagcgccggcgatcgcggcgaacttaccggcaaggaagccagccgcgagcgaacatagcgagcacgccagaagaatcagaccgaatttgacgatggcgggcatgcttttgccggtgatgccttcatcaatcaacgacgccatcaccgtggggatgaggatttccagaacaccttcgaccaccacaaatatcggggtgagaatgctgggcttcctatattcacgcagcgatttgccaagcgtgcgtacgagatgccgcttttgttttggctgcgattgcaccgcagccgttgtcacgtttgttccgctcacttactcttcctttcctgtttcgtcttcctgtgatgttttccgtacagttggttgcgattcgcattcccgcgattgccgttcccgcgattccgcctcgcacaatgccaggctggagtagcgactttcgtcgccgatcagcccggtggagaccagattggtttgcatcacgtcgagcacgtgcatgaattcgcggatctcgtcgtcgctcaggccctgaagaagaatgccttccatggcgacggcgttggctcgcagcgcttcggcgatgtcgcgcgatttgtcggtgagcacgattttcttcaaccgcgcgtccctcggcacggattcgcgcacgataagccctttgcgttccatcaatgcgagcactctgctcgacgtcgaccgggtgatgccgaagcggcgttccacatcctgcgggaagatctcctgttccgaatggcgcgcgaggaaggtgatgatgtcgatgttgccaccgctcagactctccacttccataggacgcgtcaccgcaagataccggttgatgacgttgtgcagcgatcggatggcgacgctcggcggcttgcatgcgcctcggtcccacgcttcggtgaacgcggggttcaccgaagccgttccatcgttctgtatatcgttcacggaacatacgataacacgttgtacatacaacagttgcatatgcaacattcagcgtgtcgtgtgtgacggaaccggatcgcagcacaccgagcgcaatattgtaatcgcaaaatcgcttaaaaatagccaaaaataagctcggaacaagccgaaaccaagtatgaaaaagccgaggatgtggtccgcaccggttcattcgcgggccacatcctcggcctaaatccttgaaactccttttgcttacgtcttgtttacgtcaatccgtcttattcggcggtttcggcgattttggcgtattcgtcgagcatgaaggcggtgatggccttgccgccgtcgctcatcagcaccgacatgctgttgatcggcatggagtcgaggaatagacgggtcatgtcattgtcgggcacgatcggcatgcggccggcttcaccttcggcacgcagcttctcgagcaccttggaaccgagcggatccttacgccattccatgaagttggaccattcggtgagcggctgggtcttgccgtctccatcgagctccactaccgcggaaccggcgatgtcacggctggacgtgccaacctcgatggcgtattcgccgctctccacatgccagtcgttgaacttctcagaccagtaggcgaaggcgcgatcgtcgaggtcgaaggagacttcggcggattcgccggctttgaggaacaccttcttgaagcctttgagctcgtgcttcgggcgggccacgtcagccttgccaggagccacgtacacctgcacggtttcggcggcgtcaacgttcgaggtgttcttgaccactgcgctgacggttgcggtgcaggcaccggtcttgacggccttcacgtcgctcacttcgaacgtggcgtagctcaagccgaagccgaacgggtagtcgacggccttgttgtaggtgtcgtaatagcggtagcccacaaacacgccttcgccataatcgacatgcccctcttcacccggccagttgatggtgctcggatcgtcgttgatgtcgaagggaatggtctgcgcaagcttgccggacgggctcaccttgccgaacagcacgtcggcgagcgccggaccgccggactgtccgagcagccaggattcgaggatgcccttggcgttcttggcccatggtgccacggtgacgacggagccgttggagagtacgaccacaacgttcttgttttcggctgcgacggcttcgagcagtgcgatctgcttggccggcatgtcgagggtctcacggtcgaagccttcggattcggccgcttcagggagccctaggaacatgagcaccacgtcggcgcccttggcagcttcgacggcttcggcttcgagtgccggatcggccggttcgaggtcgagggtgaatcctggggcgaacttggcatccacgccgcgttcggtgagggcgtccaggaagctggtcatcttggttggggtgatgtgcgaggaaccaccgccctggtagcgcggggtacgtgcgaattcgccgatgacggtgaccttggcatcgccagcgactggcagaatggcgtcatcgttcttgaggagcaccatggattcgacggcggcctgatgtgcgacctcatcgtgggcttcgatgtcgaaacgatagttttcgacgctcatggctgcgcgggtcttgctgaccaagtcgatcatgccttgtgccatgcggtcgagctgtgccggctggatgcggccgtcgcgtgcggcgtagacgatttggtcgtcggtgtagcttggcggcatttcgaggttgaggcccgcattgagggaggccacgcggtcgtggtcggcgccccagtcgctcatgacgataccttggaagccccattcgtcgcgcagcacgtcggtgagtagccagcgatcctgggcggcatgcacgccgttgatgcagttgtatgcgcacatgatggtccacggctgggcttccttgacgatgtgttcgaatgccgggaagtagatttcgcgcagcgcacgctgggagatgttggcgctgatgcgcagccggtcggtctcctggctgttggcggcgaaatgcttgagcgaagtgcccacgcccttggactgcacgcctgcgacgatgccgaccgcctcatgacccgccagatacgggtcttcggaccagtattcgaagcagcggccgccaagcgggttgcgcttgatgttcacgccggggccgagaattacggcaaccttctcctgaatgcattcttcggccatggcttcgccgacctggtggatgagttccggattccacgagctggacaggcccgcggccggcgggaagcaggtggcgggcacggagtcgttcaggtcggtttcgccggtgctggatgccagggatttgcgcagtccgtgggggccgtcggtgatcatgtagccgggaatgcctttggtttccacaccctgcaggtgccaggcgtcgccgccggaggtgagggacgccttctcttcgagggtcaggtcgttgacggaaggataagcggtgtcgctcatgagctgcctctttcgtatgtcttctgtgtttctggtgcctttcggctattttctcggccgtctcgcgattgtttcgcggtgggacttcaaccccgaattccctacctaccgattggtaggtactttatcaaaaaacaatcctcaacacgccaatcatctttggaaaagaaaccgaccgaccgtaaagtgaattgcatattccaataacctccagcaacgacgggagcacattatggccaacgacgaagtcgaccgcagaagcgcgattctcaacgcggcggtcgaatgtttcggcacgctcggctactacggcacgtcgctgcagcgcatcgccaccatggtgaacctcaccaaaccgggcgtgctgcattacgtcggcagcaaggaagggctgctgcatgcggtgctcgacgaaatgtacgaccgtgagaccgaggacgtcaccgccggcatggtgcgcgacgagcgtccgcttatcgccgaaatgtggcgcaggacggtggcggtcaacgccaaacgtcccgaattggtgcacatgttctccacgctgagcgccgaggcgctcaatcccgaccatccggcgcatgattatttcgccgaacgcgaggaacgtatcgtggaagtggccgcgaacatccgctggcatgtgccggaaggcgttgacgccgagcaggtgctgcgttccggattcgcgatgatggacggcgcgcagctgcgttggctgcgggttccggggcgcgatttgaacgaaatgtgggcgagttgcgaggacgtgctcttccccctgccgcagtgggagggctaccgctgaccatgaggtatctgctggcaccggattcgttcaaggaagccgcttccgcgcaggccgtggctgagtcgatacgccggggcgtggcggccggcgatcccggcgccgaatgccgcatgatgccgttgtccgatggcggcgagggattgaccgacgcgctggtccaggcaaccggcggcgaattgcgatcggagcacgcgcatgacgcgctgggccggccgatcatcacacgatatggattccttggcgagggcggtttcggaacatctcacgatggagagaatcctcgcaccgcggtggtcgagttggctgcggcgagcggcatcgagcgcatctcccccgccgaccgcgatccgttggcggcgtccactttcggcaccggcgagctgattcgcgccgcgatcgacgccggagcggaacgcatcgtacttggattgggcggcagcgccaccaccgacggcggcactggcctggcccgagcgctcggccatcgtttcctcgatgcggacgattgcgagttgccgcttggcggcggcgcactcccccggcttgcccgcatcgacgacaccgaggttcccgacgacgtgcgaaacatcccgatcgtattggcatgcgacgtcaccaatcctctgaccgggacggacggcgccgccgccgtgttcgcgccgcagaaaggcgcgaatccggaacaagtcgcattgctcgactgcggtttgggcaggctcgccgacgccatcacggcactgaacggtcgcaaaataacagataagccgggcgcgggcgcggcgggcggcaccggcggcggcatgctgggcctgttcaacgcgaccatgcgccccggcatcgagttggtgctcgatttgctgcatgcacgcgaggcgtgcgcgtgggccgatgtcgtcatcaccggcgaagggtcgatcgacgggcagacgccgtacggcaaggtaccgagcggcatcgcgcgactggcgaaatcgcaaggaaaaccggttatcgccatcggaggaaaagtgacgcgcgatccgaacgtcaccgccgcgctcaacgaagccggcatcgtcgcgacgttcggcatcgcacccggcccagccgctctgccggaactgctcaccggaacaaaacgcaacgtggaggccacctgtgccgccatcgccagtctgctgagcgtcgcgcgcgaatgctcatcgagacctcatcaatgaggaacaggaaccccgcctgttgcaccggtattgaggactactttggggtcatcatcaacaggccactcgcctgaactagattttcacatctgcttacggtaagtattcacgcaagagcggaaccgcgaaatcaacttcgccgcaaccggtctgacgaatgacatatgcatccagcaaccgcttgcgaatatgtttggcattgtcgatatcaaaattatcaaagctatcgaaaaacgacagaagtgaagccttccaccgcgcatgaccagctatgcggcgcgcttcgagaagcggaacatgagcagggccaggatctcacccgtcacggccatgccgaagaacacccacatgctggtggaaaacccggcgacgtaggcggccgcggacttcatgcccgcgacacggttcactgcggagaattcggcgatcagcgtggacgcgaccgcggtgccgatggcgccggcgagctgctgcacggtgttcatcaccgcggagccgtcggcgttcatcgcggccggcagctggttcagcgcatgcgtctggtcaggcacgagcacgaatccggatgcggccatgaacagcgcgtaggcgatcgcgacggcccattcatgcgcgccgccgagcatcatcacaatatccatgatggccacgccgacaaaaccacaggcgatgaatttcggcggaaaatgcgctttcagcgcacctccgatcaacggcgcggaaatcgcgccgaccacggctcccggcagcagaatcagggcggcgatcatgctggtgtggccgagtccgcgctgcaatagaatcggcagcaggaagttcacaccgagcacgccaccggacgacatcagcagaatcagcatgcccaatgtgaatccggggaatgcgaacgtgcgcacctcgaccagcggatgctccatcttcagctgcacggcggcgaacacacccagcaccacgatcgcgccgacaagcaccgtccagaagcgccagtcgccgttccactgcgcgaagaagctcgccgccacgatgatgccggccagaccggccgccaccaataccagcgacggcaccgacagatgccccttcccgccgtggcggatgtcggggacggtagcgcatcccagcacgagcgagatgagcaggaacgggatcatcgtgtagaagatccaatgccagttgaggaattccatgacgagcccgccgaacaccgggccgatggccggggccgcgcaggtcaccagactgaccaggccaagcatcatgccgcgcttgtcgaacggcgctttctccaggatgatgttggtcagcaacggcagcgagacgcccgtgcccaacgccatgatgagtcgcgcggtgagcaacatggggaagttcacggcgagcgcgccgaccaccgtacctgccgagaacagcgccacggcagtgacgaacagccccttggtggggaatgtgcgcaccatgaacggtgaggtggggatggctatggacaggagcagcagatagccggtggtgagccattgcaccacgtcggcggagatggagaactcccccatcagcgtggagtaggcgatgttgagcgacgtttcggataggatgccgaggaaggtgaggatggcaagcgccaccaccacgatagtgagtctgccttcgctcatggtgccggcggagctggctgccggtgttgtccgatggttgtgtcgttcgtcgtggatgctcacggttctccttgtcgtgttggcgtcgtcggcgttgacggccgccggcgatatccgcatatcgtattgcctcgcctatatctagggaggaaaagttacgcgaaattgcatgcgcgtattcggacacgcccccgattgcgccaatgctgcctatgatgagatgaaagcgtgccgattacgaagggggcgcatcagtataaagagagactgatgagaaggacaccgttgcttgtgttgcgcggcggcggccgcggccgtcatggcgctgggcgtcaccgtgcaggcgcaatgcgccgaaccgtatccgtccgatacgcagcagccggattacacggcattgctcaccgatttcaccaattattaccagccggatctcaccgcgccttccacggagctgcgtggacgcgtggtcaatgcagaggtgctcaaggaaaacagcgacgccacggtgtcggtgaatcataaggccaatgaggggcggaccagtgatgacgatccgctcaatcctcagcagcagcgcgcattgaaggacagtgattcgctgatcgaaaacacgtactccgatgcgcttggcccggttttggggaggtttctgagcgagggcatcaagcagggtgatctgccactttccacaacgttgttggtcaaacggcccggagaaagcgacatcggcacggaacggcacgcgttgctgtcacggtatgtgaacgattccgccgtgaagaagcagtatgtccatccgcgtccgttcacggatcgcacgaatggcggctatgtggctgccggtctgccgaagaccgagaatatcatccatctgccggtgtggacggacgattccggcacgcagcacaaccccggctatgacacgctcgcccccactggttcgttcccttccggtcacaccaccgtcgcctattccggcggtatcggcctggccacgctgctgccccagctcgcgccggagatcatgacgcgcgcatcggaggcggccaacaatcgtctgatcgtgggcgtgcactatccgctcgatctgatgggcgggcgcatcatcggagaggccgggcttgcgacgcggtggtccgatgaacagttccgcaacgacaagttgatgccggcatatcaggaaatgcaggcgtatatggcgaagcgttgcgtgggcgccaatatcgttgcccgcgcggcggatgatccgacgaccgtgcagaattgcgtgaccgcgttgaacgcgaattccgccgattcctccaagccgagcggcggatacaccaacgatttcaccgacgatttcagtacacagccggtgaccaaccgcgcgtcggcattggccgcctatcaggcacgcatgagctatggattcaagccgacctccgccaccggcaaggccgccgtcgtaccggaaggcgcggagaatctgttgaccaccgcgttcccgacgttgaacgccgaacaacggagggccgtgctggccgccacggagattgattccggcgaaccgttggacgcaagctcgaacggctatcagcggctgaatctcgccgccgcctacagcgccaaagtgacgctgtccgcagacggttccgtggtcaaggtggagccggggcaggccgtcgcctccgtggtgcgcgagggcgccccagctaagcccggctcatccagcggaaggagcgatgccactgccagcaccaccaaaaccattgcgaacaccggctcggacatgctggctccggcaggcatgatggtcgcctgcttcatgcttggcatcggattgatgctgacccgccgacgcgcgtaaggcaataggtcgggtcaccctatgggaggcccgaccttcactcacctattgaaacggcaacgacgccgatgctcattgcaacctgtactccagatacacctgctcctcttccatgagcccttggagcaatgcggcccccaccctgcgatgcggaatccgcaccgttggcacaggcgtttcgccggctcgttatgcgcataggtgtcgaggcggacgaccgcgcagccgtgcccggccgcatattccttcgcgtattgcaccatccggcttccatacctgtggcccgcgaaccgcggcggcacgcacagcgtatgcacgacaagcacatcctcgccttcgccgggatactgccatgccacgtcgtcgtattccgcgggctgggcatttcaatatcatgctggcacggatctcaccatcctcttccagcacgatcatctccccctgcgggcacggcgcgcttcggtacagcgatcgtcgggtatacgcccaattcccaatgggaatcgcctccatgctcctgctcgtaagtcagcaggtcctcgtaggtcgcggcgatcgccgcgatatccgcagatgttgcctgtcgtatcatgctatttcttccttttcgaaccccggtgaaccgtaaccgatgtgtcatggcgagattccgtagagggtttcactgttccgtaggtggtcgccggtggtatcggggatgaggaacggctttattcaggccattccttcggcaggcattcagccccaaccacctacggaacccgaaaaccgcctacggaaagaccggaccttgccgtgactcccggcccgtatgcatgcatggagccgataccgcaaccaagaagtcattgtagaaccgcccacacgagcaatgtccgccaaatacgacatgcgctgcggcgacttgtgaaattacctgaatcatcgtaaaataccaagtggtaattaaaggacaccgcttcaacgaggaaagtgagcaatccatgaccaacaccaccgacctgccatacaagaatcccaacctgcctgccgaagagcgcatcgccgatttgctcggacgcatgaccctcgaagagaaggtcggccagatgatgcagcttgatgctcgcagcggcgatctggatgacctgatcgtcaacaagcacgtcggctcgattctgcacacctcccccgcggacctgccccgcgcggtcgagaccgtgaacacgaagacccgcctcggcattccgctgatcatcggcgacgactgcatccacggctattccttctggccaggctccaccatcttcccatcccagctcggcatggcaacaagcttcgacacggccaaggttcaggccgcgggccgtgccaccgccgaagaggtctccaccaccggcgtgcattggacgttctcccccgtgctgtgcatcgcccgcgacacccgttggggccgtgtggacgagacgttcggcgaggatccgtatcttatcggcgagatggcctccgccatcgtcaagggctatcagggcagcgccaaagctggcgagccgctcgccaaggatgcgattctggcctgcgccaagcatttcgccggctattccgaaacgcagggcggccgcgacgcttccgaagcggacctgtcccaccgcaagctggaatcgtggttcctgccgccgttcgaacgcgtggcgaaggagggttgcggcacgttcatgctcggatacgaatccatcgacggcgtgccggtcaccttcaacaagtggctgctgtccgacaagctgcgcggcgactggcactaccagggcacgctgatcaccgactgggacaacgtcggccgttccgtgtgggagcagaaggtcaaggccgattacgtgcacgccgccgcggacgcggtcaaggccggcaacgacctgatcatgaccacgccgaagttctacgaaggtgccatcgaggccgtgaagaccggcctgctggatgagtcgctgatcgacgaagccgtgtcccgcattctcgcactcaagttccgtctaggcctgttcgaagatccgcgtctgccggaccaagagcgcatcaagacggttatcggctccaaagcccatcaagagctcaacctgcaaatcgcacgcgaatccgtggcgttgctgaagaatgacggcgcattgccgttctcggctgcggcgggcaagcgcatcgccgtggtggggccgcttgccgatgacgcgcaggagcagttgggcgattgggccggcaattccggtcaggtcaattggatgccggatggccagccgcgtgagatgatcaccaccgtgcttgacgggttcaagcagcttgcgcccgaaggatgcgaggttgcgtattcgcgtggcgcgaacatcatcgatttggtggacgatccggaaggcgagttctatccggatggccagcctcgtccgaagctcgccgtctccgccaagttcgaccagcaactgctggatgaggcggtggacaacgctcgccgttccgaccttgttgtcgccgtcgtgggcgatgtggtgcagttggtcggcgagacctgctccaccgccacactggaactgctcggcgggcagaacgccatgctcaaagcgcttgccgacgtggcccgcgagaccggcaagccgctggtcgtggtgctgatgagctccaagccgcaggtgatgccggcatgcgtgatcggcacgaatggcgtgatcgtggacgaatccacggccgacggtgtcagcgcgttcatgtgggcgccgaatccgggtatgaagggtggccaggccatcgccgaaatcattcttggcgaaaccgagccgagcggacgtctgccgatcaccttcccgcgtcatgcgggccagctgccggtctattacaaccagatccgtggccagcacggcaatcgttatgccgatctcacgcaggatccggcgttcgcgttcggcgagggcctcggctacacgaccttcgcatatggcgaaccgacaatcacgaacgttccggcttccggcacgttcgccaccaccgataccatgcatgtcgaggttgcgctcaccaacaccggcgagcgcaaaggcaccgaagtagcgcagttgtatatcggcgatatcgtgacgtcctacagttggacggaccgcgagctcaaagcgttccagcgcgtggagcttgagccgggtgagaccaagaccgttgcgttcgatattccggtttcggagtgcactatcgtcgattcggatgccaaccgtatcgtcgagccgggcgagttcgaagtgttgattggccattcgagccgtcgtcgcgatttgaagcgcaccacgttcactgtggcgtagttgtatgcgatagtgcgattgcgttgcgtaaccacattgcgtaatcgcactattcaataccccctttcgctcacgcaaagtaaatcaagccgtcaatatacgtatgtgagcgaaaaggggtaatcgtatgccattatgcaaaatcacaaatggcggaattccaacgtttcctatttctaaaatcagataattcagcgcacgtatgcgcaaaaacgcacttttccgcaatccgtgagcaaaagggtggcttgcgattggactcgtgcaagccacaaaccaccaatcaaatcgcaaatcgcaatccgtgagcaaaagggtgcctcacgcaaaccaaaccgcaaaccgcaagtccaaaaaccgcaggtcgaaaaacgaaagcagatagacaatcatcagaatcacgcaatcgcaaccaaccggcggaacggacacgaccaaatcaataaatccgaatcagcggtaggcgtcccacaggggctcggggaacagcaggttttccatttcagcccattctgcgcataggtcgacttccggttcgcgcagccaccacagctggatgccatccatgatttccatggccttgcgcaccaccggccgcatgctttcctcccatgagccgagttgcggcggaaccaaccatggataacgggaataatgtgcccagatgttgtccattcgttccatgaattcatcatgcagcggatggtccgggttcagggattcggccgacagcacggtgaacagctgcaccatcatgcgccggcgcgagttgtgtttcaccaggtagcgcaggtatgcggggaaatgcggcgcggatgggtcgctgcccggcatgcccgatgagaagaagtcctccggagtgccggtttgcccgtagtattcgtcatataccagcgccagcatcttgtctttgttttcgacgtatcgcagcacgccttgtttggagatgccgacccgatcggccacgtcctggatcgaaatgccgttgaatccgcgttcgctgatgagctgcaccgccgcatccagcacttccgcacgacgctcctgcggcgatttgcgggtacgtttcgaagtctcttcctctgccatgactccgagtctaatgccctttgcgtcgattgccgttgattgacggcgccgatgccacgtcatcgtggggcgtatccgcttgaatccatccatgacgccatacgcgggttagatcccatgcttcgagattgccgccgttgcgcgggtcgcgtggcggttttccttcgccgctgcctggtttcgcggaacgcgcaagctggtagctccaatagacctgccccgccgacgcatcccatgccgcgcgttgcaatcgcgatacttgacggtatgcgtccgctcggtttcggccgtgcagggcccaccggttctccacgcaccactcgcccacaagtacagggatatggcgggccgccgaacggatggcgatttcgcgcgcacccaccagcattcggtacagccatggcaggtgccgcgattgcaggtacagtcggcgtgccggtcccgcgaacaacggttcctccatggcgatgagatattggtgggtgtcgagcatgacgttgcgcatgccggaacgacggaaccaatcactccagcggagcagtcgaaagccgtcgtggaatacgatcagggtttccggacgtagtatggcgcgcagccgggtgtaggcgtcacggtagaagcgcttcagaaaccgtagtgggacatgcgtgctgccggaggcctcgcggacgtccttcgccgtattcgacgtgccatggaacaccgaccagctcaccggttcgttgagcacttcgatgctgtgtagggtcggctcgtcacgatatcggcgggccaatcgttccagcacattcagcgcgtattccaccaagtccggattctgcgcccatttgcacacgcccgtcagaccgccgttgtcgaaaccattctgtgagccgggcacggtatgcaagtcgatcatgatcttcagtcccgtctcccgcgcccaacggaacgcgcggtcgaggtatgcgatgcagcccggatgtccgggccaatcgccgaagatgaaatatggtatgggaatgcgcacgagattgagcccatggtcggcgatgatgcggaaatcctccagggtgatgtaggcgtcgcggtgccggcgcagttcctcggcgagattccgttcggaccagagggcgccgtgcgtgcggtgcatccagatttcgtcatcttcggcagtgcgaacgaatggttccggatccatccatttctccagcaccagccagttgccgaggttcacgccgttgattcgctcgtcgatgcccagcaccatgcatcccaccgcctttctgtgcggggtttcgcccggcttgccgtttccgcctattcaaaaaccaaacagctcaaaccaaacccctatttcagcccaatgggccaaggaacgcaccgttcgcaacgctccttggcccattgtatgcgtcccgcaatcagccacgcggccggttggaatcggaccacggccggattggggtttcggaatgatcgtggccggatgggcgggatcagtcgaccggcttcgtctcgtccgcctcgtagtcgaagaagtcgaagtcggcagtcttctcatgcaacgcggcatcggtgacggcgacgccgaccatggtgccggtgaattcgccatacttgcagtattcatcggagaaggtggtggtatcgaagtcggggccggcgatggcgaaaggctgggctacttctggacagggaaccagccctgggcgatgcagcgtccaaggtcccatgcgtcccagccgatccagccgggagtgttgacggtgtcggtgagcagcttgtagttccagtagtagaagccgctgcccttgctccatgcggcgagctgggattcggccacgccctgatacagcgagcgcttctgttcggcggtcagggtttcgacctgagccccttcctcgccgttgagcacgctttggccgccgtgggtgtccacaccgcagccgacggagttgaacaggcaccactcccccacaatcaccgggaagtattcgctcatctcggcgatcatcggcgcataggtattcctcacgaagtcgtcgtagccctccgctgtctgcgggcaacccatcgtttcggcggtcatgaggtattggtgggtatcgaggaccacgttcttaaactcgggcgcgagcttgccgtcggggccgcgcatgaagtccttccactgttcgatgtcgaaaccgtcgtggaacaccaccgccttgtctgccggcaatgcgcccttgtcggcatcgcgcagacggtggtaggcggtgatgtagaagttcttgagccagtcgaatgcgatcgggccggtgccttcggcgagttccggatcgaccgccttgtagcgttcggtcacgttcgccatcggccagcaggtggtggtgttcggctcgttgatgatctcgatgcccatcagcgcccgacgatggccgtaccgcttggagaggcgttcgagcacggacagcacgaattcgacttcgtcgggcagctgcgcccacttgcacacgccggagatgccgccgttgtcgaagccgttctggctcatcggcgcggtgcgcaggtcgatgaggatggtcagaccgtatttttcggcccagttgaaggccttgtcgagttcgtcgatgcagccgatgaacggcgcgcggtcgccgaagatgaagtacggcacggggatgcgcacggagttcagcccccatgatgcgatggtggcgaagtcgcgttcgttgatgtattcggcgcggtgggtcttgatgcgggcctcgtagacggccgggtcgagctgcgtcggcaggtagtattcgtcgtccgcggtggtgccgtcgaacagcgccgggctcatccacttctccagcaccagccagttgccgaggttcacgcctttgatgtagtcgggattcatgtgcactccttcgtacgtcatgcagtttctattacttagtaactacttagttatagtctaatacatttccgtcccacacgcaacccaacctcggcggcaccccatctccgccatcgacctttatatttgaatatataagatcgattgatggaggtgccggaatgcgatacgtgatgcggatcttcgacactccgctgctggagttcgaggcatcctacggcgaggggctgcaggccggctgagaaggaacgcacgacttccccatgccgtcgatttccacaagataacacgccgatgaggaactttgaaacagacacccccaagtacatcaaaaccaaacacccctacatctggacataccaatgaacaattcccatatgaccactagcatgaggggagacattatttataaagcataaaagaaggtccgttcagatggagaagccgagcgatagtaagaacagctccatatcagtgaattattttttgaatagtgctgcatatagcggacttttctcccttctttcggttatccttacgggtcaagtttctgcaacgtcatcactatgtgttggattagctcttggagttttatcccttttttctaggggcagtactgtttttataggtggcttgattgagcgttcatcaacggtatccctcactgagaccggtttcggattcatagttttttcacttttgctgctgcagccggcaatgggtgattttatcggcttcctttttttggatttggctttgctgggacttggtctctcactggttaattttgctctcagagggcatatcatcgctagagtaaaggataaaaagtctcaggccgctttgtttgctttagtgaccatgacagccaatcttggatccgcaattgggcctctagcttcaaattacatatataaggctttcggacaaacgctctttgttatagtcatcgtcggactctatgttttttctgctttactaactccaatagtgctgactcatcatgtcttcatacgcaatgagaaaagcagcaaagaaaatacctcttccatcgtgaagaccattacagactcgttgaaaagtcccagtacggttcttgccatcctggcggtgtttgtgggcagcataatgaatggtcagctttttgcgggaatggcattggaattccactcgttatccgatagcccagtcataagaggattgttctattccattgatgccatatcggtcatagcactgcaaatgcccgtgagtaaactcatctcgcgaggcatggctaatgggcagaatgccacctcattcatcatcaaaagcctagggatttatggaatttccttcgcactattcgcctgcggagtctcgtcgtactggtggatatgcattatagccttggttgtgttctccattgcagaatgcatctatgcgccattgatcaatattgctctggtagaggcacagccagataaacctttggtggacattttgaactatcggctgataattgcagccattggcgaatcggcaggctcattccttggcggttggatcgttccggcactacgtcctgcaggaatgacagcttggtattggtgcgcactggcgttggtgggaataatacccgcagtcgtcagtaatcaaattggaaaacgcgggaaaagaatcatccgtcgctaaagaaaagtcttggcgagcgcacaggaaggggaatgatatgaaaatactgctgctgcaacagcctaaatctttctcggattatccagaatggattaaagaggtccaagaacgcttcggtcgtttagaggttatggtcttcacctcggacaatcgggccgtgcaccatcgttggccgaacaccgtcatcaaggaaatcgtggtttctgattattcctccgatagcgctaccgcgaaattctttgatattgtcagaaaatttaaaccagataggataatttccagctcggaggaagatgtattgagggttgcagaggcgagaagtctatttggcattcccggtttgcagtatgaactggcgttgcgctgtcgagataaggtcacgatgaagcagtcggcccttgatgccggattacaggttattccctacacctcctgcaaaagctttggagatattatttcggcgttcgatcgttgggagacggttgttctcaaacctcggtggggtgcaggctccgcgggtattacgatactgcattcgaaagatgatttgcctgctttagccaccaagccggaattcatacaaaacgtacattcaaaccagtattacttagaggaatactgttccggctccgtctaccatgtggatgtggtctatatcaacgctgattcgatcctgatctcgccatcacgatatcttgtcccaccgctggatttcgagaagcaaaataccggttccgtgatgttggacgaggacgacgccgactattctgagctgctccgactgacaaaacaattaattagatctttcaaagatcagacgattcccaatgtgatgcatatcgaattctataagaacgaaaccggtgatttcatattcggggaaatggcggcacgcagaggaggcggactcatcaaacaagagctgacagccgcctatggcatggatcagagtaaggccaatttcctactggaacttggccttgtcgatgcggataccaacatcacacgattatcccaatatggcatactgctggaaaccgctggattgaactggccaaaggaaaaggaaatcccggattgggcagttttagaatctgtgggaaagaaaaaaggtatcgctcacaattctgtcgattccgacaggaaattccttatctccggtgataatgaagccgaaatcatccaacgttccaatcatcttatacacggctgatacggcaatgaagaattcgctctttgcaaggggacgatcgtaaccggcatgcataacaaaggtgcccgccgcgcatggaggggatccatcgcggcgggcacctcatgggcagggcgtcggcgatcggcatatcgccgggaaaaagggaaaaaccggcattacgcgcgagccgacgccgtatcactccggctcagtccagcacgaaggtgttgaacgatcgcggagcaagtgttaccttgaagccgcgttcggcggcatcgggatcggcgaatgcgaacgggcgctcctcgtcgagggcgttctgcgccacgaccaccaccgtgccgtccgggttgcggaaggcgatggccatcgagttgaaatggccggtggtgccgagtaccttcgcgccgggcctgacgtagtgcgagaagtggcgcatcacgtagtattccggattgcggcgcacctcgtgcttgtcggcggtgatggtgaacagggagttctgccaccagccccatgtggaatcctggtcgtcgaggatcatgttccagtaggtgtatgcggtggcgccgttgcggaagtagtggttgatcaggtggaagatgtactccgcgtactcccagctgttgtcgccggtgccgcattcggactccgactggatcagctcgatctccggccatgattcgtgcgtgcgggcgatgcagttctggccggcccactggtaggcgatgcccttgatgtacttgcgcgcgccgtcgtcgaagaggatgttgtcgacgaagcggttgtagttgttgagcgtcatgccatagccgccgccggtccaagccatgtcctccgggccgttgagggtgcccagccagatgtcggtgtcgagtccggcctcgtcgaacgccggtccaaggtagtcgcggatgaacaccttgagcgcttcggaatcccacagggcgctcgggaacttctggtcggcgaacacctcgttctgcacgtgcagctggttcacggtgatgccgtgctcggcataggcctggatgtacttgacgaagtacttggcgtaggccttcaggttctccggggtctgcacgagacggccgtaattgtaggccttcgggcgcttcatccacgtcggcgggctccacggactggagaacagctgcatgttcggctgccattcctgcgcgcggtggatgtacgggatcagggtctgctcgtcgtgttcgacggagaaatgctccatcccgtagtcgccgtcgacctcgtcgtagctgtaccagtggtcggcgaaatcattggcgccgacgggggcgcggttgaaggtgaagttcatttcgtcggggctgaacagctccttgatgatctggtcgcgttcggcttcgctgacgttctgcagcggcagccagccgagttcgttgaagcagccgccgaagccgcgcagggcctggtattcgttgccgtcgagctgcaggtcggccgcggtggtggcgttggtggattcgatgtcggaggttcggtcggcaagcttgtcgtcttgcgtcgttgcaatccaggtggtcatgatgttccttggtatcgtcgttgataattcggatattcgttgatggttagtatggatgggagaggcgggacgattcggccccgcagaggggagacggcctacggaacggccgtctcccccggtttacagcagctgccttacttgaccttcttgatggccatgatgaagaagcagccgatgatggccagcgcgatggacatcgggaacgcgaagttgtagccgaggttgaccacgatggcggacatgacgaccgggccgcacatctggccgagggtggtggccatgttcaggatgcccagatccttgccggcctcttccttgttcggcagcacgtccaccagcagcgcctggtcgacggcggagtagacggcgtagccgaggcctgcgatgccggcgaacaggtacatgcccatggtggacttgaagatccacggcatggcgatgccgacggcgaagagcacggaagcgacgacgaccgggaccttgcggcggccgatgagatcggagaccgggccggagatgaaggagccgaccagggacatgaccatcatgatcatggacacgacggacacggtgacggcggattccttgacggactggccgatgtagttctggatgatgtacagctggtagacgttgatcatctggtaggccatgagcatgcagaagcggccggcgaacgccttgtagaagtcatgcgcggtggagaacttcggcgggcggaaggaggagaggatgtccttggcggagccttcgtccttcggcaggaagtctgcggactgctccttcgggatgatgatcacggcgaccacgccaccgaggaacatgagcacgccggcgacggcgaagcccggaatcaggttttcgatgaacagtgcgccgagcatggtgccgatcggagcgccgatggtggagccggcgccgtagaaggcggacatggtgccacggatcttggaaggcacgcggtcggacaggatggcgaccatcggcgcgatcatgcagttcagaccgaacatgcaggcgcagtagaagatggtcagcagcacggcgttatgcgtggtgccggtcaggaacagggtgacgccaccgagcacggctccgaagaggatccacggggtacggcggccgaagcgggaacgggagcgatcggagaagttgccgaacatcaggttggcgaccagggatgcgaccgcggtgaacgcgttgacgatgccgaccaacgcatcggcgttgacgcccgggatggtcttgtagtgcatgggcagcagcactgcggaaacgatgcccagaccggacatccacagcactccgaataccaggaagcctgcgccgaaacgtgcggcgttcatcttggacagcggcttgccggtttccggggacagcgacggatccttttccgccgcggcgatgttggcgttgtaagcggcaaggcgctccgccttgctggcgattgcttcactcatgaaactctctccttcgaatcatgcttcagtagtgaacttatgttatgtgcgattccgcaccttagcggtgtatgtggtggtgggacggcctcgccccatctgttaactaccatgtggtaactaacgtgttttcagcgtaaaccatctttcgcaaagacacaagtcgacgtcatgtcatcgccgtctcaaagcgtttgcaaaaccggtcggacactgtttcattcagcttcacagtcaccggtttttattacctagtaactgcttagttaaagcatattacaaatcgtttgtctgcgataatccggcgtattccaagggttcccatcgtcttcttctcccccttcttgtaccttagtaagcaccagatgaaggagagcatatgcgtcgccgcaccgaaaacaaacccagaaagcgaatgagcgccgaggatagcaggaaggcgattctcgaaaccacggtctcattcatctcccagttcggtttctggggcttcaccatacgcgatgtggcccagactcagaacatcaccgaagccggcctcctttactacttcaaatccaaagaacaactgcttgaggaaaccctcaaatacgccgatcggaccaatcagatcgccatcgccgagcatcttggcgtgcagggcgtgaccggcgaagtccttgacgacggcatcgcataccactgcgatctggggctgaaggccatttccacgggaaccgtggagaccaacgccgaccgtccggagatggtccgtctctacaccttgctggaaagcgaggcgttgagcaaggaccatcccgtacacgggtatttcgaacagcgcgaaatcaatctgctgaaggaatacgcgttcgcggccgagcgcgacggcgtcgccgatccggagcgcaccgcgctgcaggtcctgtccgcgatggagggtctgcagctgcgctggctcaacgaatcgcatgacgtcgacttcgtcggggaatggaaggccatcatcgacctgctcatcccctgacccagtcgagccgtcacgtcgccgtcaccgttgccaccaccgctttgccgctcagccggcgatgacggccacgttccaacggccaatcgtcagcatgtcgccagctgcgatcttcgcgccttctttcaaagcaaccgctgcggtagcggattcgtcaacggtgccgtcggaacccactaccaccggggcgaccaccacatcgcccgacaccgggctggcgatggtgacttcgtcggcggaatagttgagcagatacgtcacctgctcgccgcgggcgttcgttccgcggcgcaccgtcacctgtccggcgagcgcggtgccggcatcggcgatgcccgcgtgttccacggcttcacgcaggacggcgcggatggtgtcggcgtcgagcagggtggcgatccattcggcgtcgcccttgccgaagccatgtcgggtcaccgcggcgtaattcttccacgcgtagtggccgtagctggcgagcacgtcggtgccgtcgaatggggtgaccagttcgatgagcgcctgcgcgtcgcttgccggggttttggcgagcgttccggcgaattccacggatacgtggccgttcgggcgggtgaattggttgtaggtcatgccgaacacgtcggtgaggttgtgcggcgcgcggtcgtgccatacggtcacctcgtcgtcggttacgaaggagcgcatggtggagacaaggtggccgccgctggagacgaattcgcgcagacggtcggttgtttcctgcggagtgcagtacagtgccggggtcacgatcatctcgtatttggccaggcgttcggccggcgcgtcggacgggatgaaatcgcattccacgttgagttcgaacagcgcgtcgtagatgttgcgcaccacgtcgttgtacttgagggtgccgccgaacgggaagccggcttcgatgaggaaccagtcgagcgcggtcagcgattcgttgctgaccatgatggccaccttgttgtgcttcttcaggtggacgagccgctcccccacttccggtttggcgatctcgcggccgaacacgcccgcctcgcggtaggtgggattcggttcgaggtcgtggctcagcaggcccttccaatatgtttcaaaggaattgtggatggagtgccagtgccaatattccaccatgtcggcgccggaggcgaggtgggagtaggcctgcaggcgcagctggcccgggaacggcacccagccgtgctggccctgggcctccgtttcgagcaccaggtagttcctgccgtccttggtggagcgggtcatgtcgccaccgaaggcgatctccctgccggtcaggtcgtcctcggtggggtggtagatgtccacgccggtgatgtccacggcggtcgaggccttgaagtggtcgacggccggctgcacgccgtaggagtatccgcgccattcgaaatcgaagttgtgggtgatgaactggtcgtcatgcgcgtattcgcgcacgatgtcggcctgccactgcaggaaggcgcgcacctggtcgcggcggaacttgtcgaattcgccgcccagggactcgttgatggtggcggtcacgtccgggaagtcctcccaggagtcgatgcggttggaccagtagtcgaggccgaagtggtggttgagctcgtccagatcgccgtggaacttctcgcgcagatacttgacgaacaggcgctgcatgtcctcggagacggaatcgtagtatttcgtctcgttgtccacctggtagccgatgacggccggatggtcggcgacgtgggagatgagcttgcggatcacacgttcgccgtagaagcggtaggtggcgttgacgatgtccatgatctggcgcgcgccatacttgccctgtccgttcggcgtgaccgcgagcacgctcgggtcgagcttgacgagccagctgggcaccgcgtaggtcggcgtgccgacgatgacatcgatgccggcacgctgcgcggcgtcgagcgcacggtccacataggtgaagtcgaatacacccggttgcggttcgcaggtgctccatgtggattcggcgatgcggatgacgttcagccccgcgtccttcatcatcgccatgtcctcatcgatgcggtcaatacccttcatcatgagatattcgtcgtagtatgcggcgccgaacagaatgtggtctgcttcgtaacggcccatgactcctccatcgtcctcgtcgacttttatatctaacggttattagatataagaactatatatcttccgaaacaaatcgtcaactgtcgcagattttcaggcgtttcttaactaacaaccattagatatatgtcttcggaaggcttaccgatatccgtcccacaccggcgaggggaagatcatccgctcgaagacgagccactcgtcgtacaggtcgatcggcggcttgcgcgtccaccgcagctggatgccatccatcgcctcgatgcattgccgtacgatcggccgcatattatcccatccgccgacttccggaggcaatttccatgcgaactttgagtaatgctcccacgtcagatccggtcggttttcgaaatactcgtgcagtggatggtccgcgttgaacgattcagtttccaaaaccatgtacagctgcagcagactgcggcgttgcgcattgtagcggaccagaaaccgcagatatgcgggaaacagcatgccgtcagaatcgctgccgggcaatcccgacttggcgaagtcggcgggtgtgccctgctggtcgtagctatcggtgaccagcagcgacaacaaccgctccttgttgccgatgtagtgcagcagtccgggctggctcatgccgatggcgtcggcgatgtccttgagcgacgtgccgtagtaccccttctcgccgatcagcttgcccgccgccgcgatgatttcgcgtttgcgctcttcgggcgatttacgaacccgctttttcccctcggtaaccatatggaacagcgtaccatcggacgggccctcggccggtcacgcctggaagacgtccggatgcttcggatcgcccggttcgtcggcgagcacaccctcaaggccgagaaactcctgccagaattccagcgagttgccgtatgggatggcctggcttccgcgcgcctgcaggttcgccttggcttcgaacacatcctcctcgcggatgccgtcgaagtagctttccagtcggtcgagattcgtcggatcgtagaacagcgagccgatgatctcggtaagccgctcggcgcgggccaccggcagcgaatcccagtggcggaattcgatgaagttcttcaaacgcacgtcgttgaagtgcgtggagatcacatggttgatctcgtacgcgttgagctcgcggtccgggtacacgtcgttcgcgttctcgtagaacgccggatggtgcagatcggtgccgggcaccgccagcgcctccggggtgtgggtcaggtcggcgaacatcatcggcgtggacagcacgtccaccgcgtaatcctcccaaccgaagcgcgggtcgaacagaccggggatgacgttcgtgcgctggaagtccagataatcccacatgcgctggcgcagcagcggatacgggttctcacggccttcgaaatacggggtgttgcggaagaaccatgccagaatcgggccgatcaccgtacccaaccgcagtttggcgatcgcgtcctgttccgaaacgtagtcgatgctgacctgtgtcgaagcggagcaacgcatcatgcacggaccgaactgtccgacacgtcccaggtaggcggtcatcgccttgtatcggtccttcggattgacgggaatgtcggcgtaactggatttcggttggtaaccatagttgacgagtcggaaaccaagttcttcgaggatggggtcgacttcgcggcggaacgcgccgtacaatgtggcgagctcctccggcttgtgcaggatgccgatggacgtttccaactgtccgcccggttccaaagatacggagatgccgtcacgggcgagtccgaccagtcgcccgttttcccagtattccttgttttcgtcgtaatacgggcggatgcggttgagcaacgcttcaatgccgttgctttcgtagtaggtcaccgcggtatcgtcgctgttatgtaccggcaggtgttcgatttccacgccaaaaccgccggtgccgcgctgttggcagccggattcgaagaatttgataaggctttccacatgcttcggattcggctcggtcagcaggtgcgcgtacgtgatctttggcgttgtcatagtggccatcctaacgaaaagcgccattcgcaacgcaggctacgctatacggaaaatcgataaccgaccatcattccccatcgatttggctggcgatttgaatgccgattcgacgaccatcgattttacgatcgccgaatcagccgtcgatttggcggctcagataccgtcgaaccgacgtcggaaagtttcccaacgtcggttcgacggaaataagaatggcgattcaagcggccttctcgctgttgcgcgcctcttcggctgcgcggtgcgccttcttggcagcggagatcatcagcttgatgcggttgagctggttggcttccgaagcgcccggatcgtaatcgatggacacgatgttggcttccggatgcagtcggcggatcttgccgaacatgcctcggcctgtcacgtggttcggcaggcaggcgaacggctgcgcgcacaccacgttcgggcatcccgattcgatgagttccaggatttccgcggtcagcagccagccttcgccggcctgcacgcccacggacgtgacctcgtcggccttcttgaccagttcaggcatcggcagatcctgcgagaacttgccgtgagccagatcgatcgcctcgcgtaccggagcgttgtacaggtcgaggcccttgcgcatcagcgcatagccgatcttgctgccgcccatgccgaggtaatgctcgttccagtcggaaatgtacggtcgggtggtcatgaattccatgatgcccggcaccacggcctcgcaatcctgcgattcgatgacgtcgaccacatggttgttggcgtccggctggtacttgacgaggatctcgccgaccacgccgacgcgcaccttgcgcggctcgtccttcaacggcaacgagtcgaacgacttgacgatctccttgacgagcgtcggatacggcaggtattccttgcctatgaacttgcgtgccgtcttggaacgaccgtggttctcgagcgtctcgcgcacgatggtgtcccacgtcttgtacagctggttcgcgctgccgggtgtcacttcgtacggacgcacgcggtacaggcacttcatcagcagatcgccaacgataagcgccttgatggcacgatgcagcaaagccggcgtggcggtgaagcccgggttgtcctcgatgccctgcgtggagatggcgatcaccggaatctgcggataaccggcgtccaccagcgccttgcgaatcaggccgaagtagttggtggcacggcacatgccgccggtctgcgtgatggcgagcgcggtgtggtccggatcgtatttgccttccagaatcgcgtccacgagctggccgatgaccatgatggccggatagcaggcgtcgttgttgacgtatttcaggccggtttcgacgtcctcacggctggcgtgctccagaatgtcgaacttgtagccgccggagcggatgacggattccaccagagagaagtggatcgggctcatctgcggagccacgatggtgtagtccttcatgttcttgccgaacgggatgcggttcgcgtacttggacagggtcgccgagttgtgtgcggacgcgcccttgccatttgtctgcgttttggcggtttcttgcgattcgcccttgccgttttccgccgcgcgcttggatgcggccgtgacggcttcggtgagtttcggattggctttcatgacggtgtcgagcatgacctggcgaccgggggtcggcgcttcggtgccggtcttgcggaatccgtcgttcttcttgttgcgttcacgctcttcgacggccgccttaagcgagcgcagacggattttcgccgcacccaggttggagacctcgtcgattttgagcatggtgtacacgtcggccttgtccgccaggatctcggacacctggtcggtggtgatggcgtcgaggccgcagccgaaggagttgagctgcacgagctcgagtcccggataggaggccacgaaatgggccgccgcgtacagacgcgcatggtaggcccactggttggtgacgcgcagcggcatcttggtgaccttgcggtcgtcgacgtggcggaagccgttcgcgttcttcttgcggggatcctcttcgccttcggcgaggaattcgctcaggttgagcttctcccccggctgcagttcgcagatggagtcttcggacagcaccaccatgccgagcgcgcagatggtttccggaatgccgtggttgatttccgggtcgacgtggtatgggcggccggcgagcacgatgcccttgcagtcgtgttccttcatgtaggcgagggccttgaggccttccatctgcacgtcgtgcttgaacacctcgttttcggcgtaggcggccttgaccgcggtctcggcttcctcgcgggtcacgttggcccaggcgaattcctcgacgatgcggtccaccatgagctcatggttggccatgttgaagtacgggcgcatgtagcgcacgccttcctcgcgcagttcgggcatgttcgcgccgatgaccaccggatagttggccacgaccgggcagttgtagtggttgtcggtgttgggaacgaagttctcctcatagctcacgcacgggtagaagatcgtcttgatgcccttgttgagcagccacttgatgtggccgtgcacgagtttggccggatagcagatgttctcggaggcgatcgattcgatgccggtttcgaacagttcgtgcgagctgcggccggagatcatcaccttgaagccgagcgaggtgagcagcgtgaaccagaacgggtagttctcgtacatgttgagcacgcgtggaatgccgatttcgccgcgggtggccttcttgtcggtcagacgacggtaggcgaagcaacgcttgtatttgtagtcgtacaggttgggcctgtcggaacgctgcttcttggaatcgccgccgcgttcgcaacggttgccggtcacgtagcgggagccatcctggaacgtggtgatggtgagcttgcagtggttctggcatagcttgcacacgtcgcgttcggtggtcatggacaggttgtcgagctcgctgccggacacgatgctggacgcggtatgcgtgacgccgtcgatgtcgacggtcttgcctccgtcggcgtccgcgtcaccatcgtcgagtccgtcggcgatgtcggtgtaatgcatgcgcgcggtcagcgcggcaccgtatgcgcccatcaggccggcgatgttcggtcgggtcacctcacgttcggtgagcagctcgaaggcgcgcagcacggcgtcgttgaggaacgtaccgccctgcaccaccacggtgtcgcccagctcgccggaatcgcgcagcttgatcaccttatacagcgcgttgcgcaccacggaatagcacaggccggccgcgatgtcctccatcgaggcgccttccttctgcgcctgcttgacggaggagttcatgaacacggtgcagcgcgagcccaggtcgacgggatgtgtggagttgagcgcggcctgcgtgaactcctggatcgtcaatcccatggactgtgcaaaggtctgcaggaacgaaccgcagccggacgaacaggcctcgttgacggcgatcgagtcgatcacaccgttggagatcgccaagtatttcatgtcctggccgccgatgtcgatgacggcggtaacgcccggcgagaccatttccgcaccgcgataatgggccatggtctccaccacgccctcgtccagatgcaggccggtggtgatcagtccctcgccgtatccggtggcgcaggagcgtgctatccacgcgccttccggcagctggctttgaatctgcttgacgatgttgacagcggccgtcagcgggctgccttcgttggtggcgtacgacgaccatacgatttcgcggtcgtcgttgacgagcgtcgctttgatggtggtcgatccggcgtcgatgccgaggaagtgcgggccttgcgcgccttccagcgtgccgatgtgcacatgctcgcggtggtggcgcttgttgaacgcctcacggtccgcttcggtcgggaacagcggaggcatggtgggggtgttggccggcagattcttcaggtcttcaaggcttttcagaatatcggcgcaggtgcgtgcttcgaaatgctggccctcctcaagctggtccggttcgccggcgagcagcgcggagccgaacgccacgtacaggtgcgcgtcggtcggcacgatgaattcgtcgactttgccttcgagcgcgcggtggaacgcctcgcgcagctcggacatgaagaacagcggaccgcccaggaagatgacggtgccgtggattggtcggccggacgccagacctgcgatggtctgcgtggcgaccgccgtgaagatggatgcggccagatcgggcttggccgcgccgtcgttgatgagcggctgaagatcggttttggcgaacacgccgcaacgggaggcgatcggatagagcgtctcgtaatgcttggccatgtcgttgaggcccgccgcgtcggtgtcgagcagggtggccatctggtcgatgaacgcgccggtgccgcctgcgcaggaaccgttcatgcgctgttccggagtcggcttcagatatgtgatcttggcgtcctcaccgccaagttcgataatgacgtcggcttgcggatattcctcgtcgatggcgcgggtctcggcgatgacctcctgcacgaacggcacatggagattatcggccaaggcaaggccgccggaaccggtgatggccagacgaatcggctcgtcgccgcggccacgggcctcaagttctttgtggatgtcctccagcaggcccgccacggtggcacgcacgttggcgtggtggcgacggtaatcggagaagagcaccgcgtcgagcgaatcggtctgatcgagcaccacggccttcaccgtggtggaaccgatgtcaagacctacgcgcaacggcttcgtatcgcaggtgttgcctgcggtaactgctgcttcgaccatgtactgtacctctatcgttctcatccgccgggttgcgtccgtgccgacacgaacgccctgccccggttatccaagtatgtaatggtagtctgtgcccctgcctaattcggcacggtatcgcatgaagtgcacgacacgacgcataattagacaacgaatatagtcagcttgcctaattccaaccgttcgtacacgaaccgttcaaaaccattcaggaagccgccccctcccccgcagcgcggtccttgccgtagatttcgggaatgaaccgcgtctgatcgtgtagtttcgaccacagcaccacctgcccgctttccaacgacttgggcacatcgatgatgcgctggttggagctgccgcgaaactgcagcagcgaatcgtgcagatccttgatataccggccatccacgaggatatcgatctgttcgagcagttcacgcttgtcggggctttcgccttcgcgcatgagctcctcccacgtgtagcccgtccagcaccagatgtctttggtgtggccgaaccgctcacggattttgcgtgaaagcggcagcagcacgccggtgttgagcagcggctcgcccccgaggaaggtgatgccctgcacgtacggcaggctcagatcggccatgatctgagcttcgagccggtcgttgtattcgtggccggcgcggaaatcccagatcgacgagttgtagcagccttcgcagtggaatgggcagccggagacgtacagcgagcagcggattccctcgccgtcggtcatgaggaaccgcttgtagtcggcgatcatgttgtggctcatcgcgttcgtccattgtccggcacgcgggttgctggcgcggtttgtcggaatgaacggcccgcggccggtttcgccggccgcgaaatcacggcgagacacagcgggatcggcgctgcttaccatacgttgctcctgaattgcctgttgttttgcgattattgcgattgattacttggcttcctcgaaccattcacgttcggaaccgtcgtcaagggtgacatggccggtttcgccgctcatgtgcttgacgcggtgcgcgatttcctcgtgtcggccgtgcaccatcgggcgctgcaccggattgccgaggtagccgcaggtgcgcttggtcacgttgcagcggtccgggtcggagttgccgcattcggggcacttgaagccttcctcggtcggttcgaagtcaccttcgaaaccgcattcgtagcaacggtcgattggcgtgttcgtgccgagatagccgatgccgatggtgtaggcgtagtcccacaccgcttcgagcgccttcggattggcctgcaggcacgggaattcgcagtagttgatgaagccgccggaagcgtagtacgggaagtccttctcgtagtcgagcttctccatcggcgtgggctgcagccacaccgggtagtggaaggagttggtgtagaagtcgtggtcggtgacgccgtccacttcgccgaacttctcgcggtccatgcggttgaagcggtcggtgagcgattcggccggcgtggagtacacggagtagtggtagccttccgcggtgctccaatccttgcacagctcgttcatgcgcttgacgatggacagtgcgaattccttgccttccggatcccagtcgtggtcgcgcatccagcccttgccatagaacacgctggtcgcctcatacaggccgatgtagccgagggacacggtggcgcgttcgttgcggaacagctgatcaacgctgtcgttggcgccgagacggccgaatgcgccgaagcggaacagggtcggggcgttgaccggagtggcctgcttgcaacgcatgatgcggaactgcaacgcctgatgggcgacggccatacgctcgtcgaagatcttccagaagcggtccttgtctccgtgggattccaatgcgatgcgcggaatgttcacggtgaccacgccgaggttcatgcggccgtcctcgacatccttgccggtcttcgggtcgatccagccctgcaggaaggaacggcagcccatcggcgctttgaaggagccggtgatcttcacgatgttctcgtagaagatgacgtccgggtacatgcgcttggtggcgcattcgagggccaactgcttcaggtcgtagttcgggtcgcccggatcggcgttcacaccgtgcttgatggtgaagacgagcttcgggaagatggcggtgtgatgctcggaaccgaggccgcggatgcggttgaggaagatggcgcgctggatttcgcgcgcgaaccagtcggtgccgagaccgaagccgacggtcacgaacggggtctggccgttggacacacggttggagttgatctggtattccatggtctgcatggcgtcgtagatggccttgcgggtctggatcttcgcccagatctcacgcagctgctgcagacggtcggacgtcttgtcgaacggctcgtccatcggcagtgccggacgatccttttcgaagtgcaggcgcttcggctcgacggccttggccatgcgcacctgacgttcggcgatctcgatcggcagatcgtcgggcatgatctcgtgggcctgctcaaggaacttgtcgtagtccttcttggcgtattcggcgaaatgctcgtcggcgcggttggcggtctgtccgccgtactggctggaggccacgtccttcatgatctgggtgatctgcgtggcggcgatggagatgctgttcggcgaacccatcggcgcgttgccgagggtgaagccattggccagcatgtcccaatagttcggcagcgagcagttggactgcgcggtgaacggcgagtaatcggcgtcgtggaagtggatgtcgcccttcatatgcgcgttggacaccgcatccggcagcatggagaaggcggacgccttggacaccgcgccggccagcaggtcacgctgggtggagtagacgttggagtccttgttggcgttctcacgcaccagagcctcgtcgcggtccaccaagcggcgcacggcctcgttgatgtctgtggccttggcgcgctcgatgtccttgttcagacggtagttggtgtaggtgcgggccacgtcgtacagatgatcctcgatcagcccatgctccacgaggttttggatgtcctcgatcttcgccggaccattgtaacggtccttgatttcggcctcgacctgattggcgatgtcgcgaatcagccgttcctcctgaggaccgattttcttgtcgaggtcggcgaaagccgatttcaccgcgctgatgatgttgatcggatcgaaatcgaccacacgcccgtcgcgcttctcgacaagcaccttgaccatttccggcgcgttctcggtttcggtcgcaacgccttccagagtctgggtttccatgtatatttcctttccgggccggacccatccggccaggtttcatgcttcgtccgcatgcccgttcgtatctacagatgcacactctacgccaaggtcggcactaaatgtagtgtcaccacgccgctagagaaactatatattctacttttggcgagatttcgccattttgtaccttgtgtgacaaaagtaacgatttcatctcggagtgtcgttttgacacagccccacacaccgtactatcttcacgcacggagcattcgcaacactcgaacatatgttccatttgtccgcaagatgatggaatcttgacttatgacttggaacccggattacaacccaccgacggcgcagcggacgtcgaagccgctgccccgtctggcgtcggaaaccaccgccgacaacccttggccggtgagcctgctcagcgagaagttctacacggcggtcgaacgttggccctccgtatgggtggccgggcaaatcacgcagatcaacacgcgtcgtcagggaagcgcctacatcacgctgcgcgacgaccagcaggacatcgctatggaagtcaacggcttcggacggttcgccgcggcggcggcgccgtttgtgcagggcgaccgtgtcatcatccacggcaagccgaacgtgtggatgaagcgcacgtcgctgtcgttgcgcggcgacgcgatcatcacggccggcgcgggcggcagtctgaaggccatgatcgacgagctacgcaagaagcttaagggagaaggtctgttcgacgccgatcgcaagaagccgttgccggaatttccgcattgcatcggcttgatctgcgcgccgcaggcacgtgcggaaggcgacgtcatcaccaacgtgcgtctgcgttggcccgtcgtcggcttcaaggtgacgcatgtgcacgtgcagggcgagcagtgcccgtcggacgtggtagcggccatccggcagctggatgccgatccagatgtggatgtgatcatcgtggcgcgtggcggcggcgctttcgaagatctgattggcttttccgatgagaacgtggtgcgcgccgcggcggcggcccacactcctctgatttccgccatcgggcatgaggacgattggaccctgctggatttggtggccgacctcagggcctccacgccgaccgacgcagcgaagaaggtcgtgccggacgtgcatgagcagatgcagctgattcaggtgaacctggaccgcatgcgcatgcgcatcgacgccaccgtctccaacgagaccaggcttatcgaaggctacgcgaaccgtccaagcctcacccagccgctcaccatgttggaaccgcatcagcgtttccttgatgacgcacgcacaagaatgcggatcggtctgacccgtattcttgacgacgcgagcctgaccatcgagaaagcgcacgcgtcgctgaccgcgctgagtccgcaatccacgcttgaccgcgggtacgcggtggtgcaatgcgccgacgggcatgtgcttgacgacgcggacaaggtgaagacgggcgaccagctgaccatgaccttgaagcacggcatcgtcgtgtctgaagtgaaaaccgtaacgaaggagtagcacatgagcaacgaagcagcaccggcatccagcctgaccgacaaggaacgcgaagcaatcgcgcagatgccatacgaggaggcgcgcgacaagctcatccaggccgtgcaggcgttggaggcgggcggcctgaacctcgaccagtccatgcggcagtgggagatcggcgaggcgttggccaagcgcgcgcagagcctgcttggcgaggtccgagccaagctcgacgccgcgcaggcagagcaggccaccgcggccaacaccgcaggcacgcaagacaatctggcctgagcatccgtcgcggcacagccgctcccctcacctacggacgttccaccggaacgtccgtcaaacggcttgagcccgaacaatcaggtccgattacccgtcatgtcgagtccatattgtgtgtacaatggtgactcgttgcctcagtagctcagtggatagagcacttctctcctaaagaaggtgtcgtaggttcgattcctatctggggcactttttcatatccccgtacattgtcggcgcgcatcgccatcggcagcatccaagatcaatcgcacgtccgcaatccggacaacaccatctcaccgccaccctccagcacaggcacaatgaccctccctctgttatagtggcaaacggatacttaagcggttgagtgaatgtatccaaaaggttcccccttctgctatggaagcatcggaaagcaaccgcacaacccatacatcacctttggaagaccaagggatcagcatgcaagacataccatatttctctattgtggaacggctggcgcacacgaatccggtaggacagttgcccggaccgctctcctacaagctgctcgaccagttcaccatgccgatgctgcccacagaaccgcaatgcacgaacgtcatcgcctgcatctgatattcgaataacatgccggtcgtcaccgtctagccacgggcttagccgacccgcacaatcgccagcagcgctttgtggtcgctgccgtccactttgactgtgcgcacctgtccggcctgcatgccggaatccagtacgatatggtcgattccggcgaacgacggcacgtaatcgacattcgcaggccatgagaatttcaatccctcgccggcctgacgggaggcgtcggagaaacggtttcccagaatgttgcggaacggcgtatggtcgtacgtcgcgttgaaatcacccatgaaaacgtaccgtcggctagtgtcgaaacgtagtttcgccagttcgtcgagcgaccgcttccactgctgccagtaatcgttcgtcggcgacgtggtatgcacggatacgaaacgcacctgcgtggctcccccattgaacgaaacggtgccgcccggcatgaacgacgcgctcgaatcgacatcgtcatcggaagggtcgtcaagcggactcgccgaccaaaggccgttgccgtacacgccgtccgaactcgacacctgcgcatagggcagatacgaggcgatgccggcacggttcagatcgtccacgaaagcgtcggtcgtctcctgcaacgcaagcacctcgacgtgttcgctgcgcaccagatccacgatctcacgcgcatcggcgcgccctttgtacacattgcacgtcatcagccgcgcgtagccgtcatccgtgttgacggtttcgccggacgccgccgcgactgcggcacgtggcagtttcgaaggctggtagaagaacggatactgccagaacgcctgcaacgcaatcgccagaacggccatcacgatggacaccgtacgtttggagacgatggcgcagacgagcgcgattacggcgagcagcgtgaaccatggcactagggagacgacgatcggcatatacggcaacgcctgcagttcttccggcagaatgtgcgtgacagtgcccagcagcgcggcgagcgcgaatatgaaggcaatcaccgcgcagatgaagttgcgtacgcgatgcgttttcgtcttattcagcgtgcgtagcggcttgaccggtctcgttgcggccggttttgccttagcccgattcgctttggccgacgcttgcgatttgcccgttgccggcccttgcggctggcgtgtttttgcctgagccataccattcccttgttttttcggaacgcacgtccgcgaccatccatgtccgcccgtgtccgtttatgtccgttccgttgatgttccgacggtttccttcacgccttcggcttagtcgtcgaggccgagctcgtggcggatgccgtcgatgatgatgcggctggcggtggtgccacgctcccgcgcgttttcctgcagcatcatcttcagatcggacgggatcttgaaactcatgagcacacgttcgccgttgccgttgccattgccacggctgcgggtgtcctgcacgctggtcagcggagcggtggacgctgccttcgcaccaccgttcggttttctaatggccatcaggcgatcgcctcctcaagttcgagatacacgtcttcatacccattgagattgctgggaaatgcgtggccaatgactttctgcatgcccacgcgcttgggtacggacgcgtcgaagacgctggcgccgcgttcgcggatgagattgaccgcgttgcccgccagcttgttgttttccactttgagcagcagcagcgcgtacggtttgccggccgcgtcgaggctttccgcggtttcgagcgcatgactcagttcgaatggcccctgggtggccggaacgatgacgaaatcggccacatcgcaggccacatccaccacgttgccggccggcgggcagtcgatgatgacgagttcgtcatccgccatggttttgcgcagtcgtttcagtttgccgatattggcggagtccacggtgaacggcagggtttcgccggcgtcttcggcgtcgcccgcccatgtggtggcgtcgccttgcggatcggtgtccagcacggacacgttgcggttgtgccgtgcggccgcggtggccaacgccatggcggtggtggttttgccgctgccgcctttgaggttgatgaccgagatgatcatgaaggttcctccgcttcgacaatcaatttatataagacgtatatactttttatatattggatagacgacagtcacgctgacggcgtaacggcattggcaatgtaaaagatagtggcgacgcgctcttgccagttgctttgacgggtaacgaaaaatcccgaggagctcagctcaactcgggattcgaaaagagtaaacgcggcgacttgctactctcccacaccctctcgagtgcagtaccatcgccgtgctaggccttagcttccgggttcggaatgggaccgggcgtctcacctaggctatgatcaccgcaagagaaaacaatacgcgaacatgcggcaatcggcaaacttcggcgtgtcgcgcactgcaatcgcattccccaatcgccaatgatcgccagtaatcgcgcgaatgccggcaatcgcaatgcatatgcgctacagtcgaagcaatgccgcaacaattgcggcgtgcttacgaaagaaggccagcaatgacgatcgcctcctgcggttccgtttccgcaaccactttgggtctgccgaattccactgcgattcccgccgagaaggcgaggctgccgaaaggcctgttcgtggcgaagattccggtttccgccaaaacaaagcagcgtttggcgaacgacatcgaatcaatcaccatgctgtcgctgctgcaggcgcgcaatatcggactcgccgccggtacgcgcgtgccggaaatactggtgatcggcctgcgtttgcacgaaccaaacgccgccgttccgacggatatcgtcgaattgattgcgatgcaacgcaagtcgggcatgctgttcgtttgcgtacgcgacgccgatttcgagggtacgacgcgtcaggagtgcgcgttcgccgtccgtcgagcgctgccggcacgtgccgggcacacgaccacatccaaggtgttcgcttccgattggcagccggccggcgaggccacgctgaacgccacggatccggcggtcgattccatggacgccttgtgggagtcgctatgctcgcaggtgattctggacgacccctcccccatcgacgtgaacacgcgtcttgcccgacgcatgcagattgcacagctcaccgcgcaggtcgacaagctcacccgcgaccatcagcgtgccaagaatcccgaacaacgcaatgaaatctacgcgaaactgcacaagacgaagcgccagttggaggaactgcaagggcagtaataccgccgtaatacaaagctcggctgcaatcgttacgattaccgagattccagtaattgcaacaattacagccgagccgtaagcgaggtttggcaacgtggccaaagcgcgctctcaacaacgcgccacagccgcgaagccgctagaaaccaagccttgtgcggccgaactggtcgagccagcgcagaatcgcgccttctcgcagcgcccacgggcagatttcgatttctttgacgtccagcgccttcataatctcatcgatcaccaggccaccgccgacgatctgatacgtacgttccggcgtgacgcccggcaatgcggtgcgctggtccggggcgatggccgcaagacgcggtagccaatcctcgagctggtcgatcgtcataatcgacgtgtccacacggcccggttggcgcatcaccgcaccggcgagacgggccagggagcgaatcgtcttcgacgtgcccacggcatgcatcggatgcttcgatttggggaacgacttgaccattggctcgaggatcttgcggatgttcttgcgggcagcttccagatcgtcatcatccgcgacgccgctttccggcaggaactcgcgcgtcacgcggccagctccggcaggaacggacagcgcgacggtcgggtcctcgtcggagcccatggccacttcgagcgagccgccgccgatgtcgatgacgagcagacgaccggcatcccagccataccaacggcgggcggccaggaaggtgagtcgggcctcatccacgccggacagcacggtgaccggctggccgatggcctcttcaatcttgcgtaggatcttgcctccgttcggcgcttcgcgtagtgcggaagtggccaggaccagcagctgggtgatttcgtattcttcggcgagtttcatcaccttttcaaccgcgctaagcaaggcttcggtgcccgcttttttgatgctgccgtcatctttgagatactgcatcaggcgaatggtgcttttggtgctggcctcgggctcggggcgcgcgcccggagccgcgtcgacgatgagcatgtggacggtgttcgaaccaatatcaagcacgccaagtcgggtggcgtgcgaatgcaatgtaaccatggttcacagcataatagtttaaacgtttcacctattgcgcgacatgccttgacaacatttgcaaatatgacggtgcccaccctcggaaaggagggtgggcatccaatgatcacaatacgggaaacgattgcatcggcgtgaaaaatcgcgcttcaggcatatgtttcagccgagtacctcagccacgcactttggctacgaaatcgccaagccgattcaaaccttcacgcaacgcctcacgagaggcagcatacgacaaacgcacgtgcgtgtccgcggtggcctcgccgaaatcgcggccaggcgtcaacgcgatatgcgcttccttcagcgcacgctcgcagaacgtccacgcgtccaaaccggtgctggaaatgttgaaatacgcgtagaacgcgccgttcggttcgacttccagcggtagaccgatctcggccagaccgtccaccacaatgcggcggcgctccagcagttcctgacggcgttcctcgcacacggccagcgtttccggcgtgaagcaggcgagcgccgcatgctgggtcggcgtgtgcgcgcacaggaagaagttggtggcgaggtcgtccatggcttcgagcgcgtattcgggcacgaccatccagccgagcctccagccggtcatgccgaagaacttggagaagctggagcagacgatggcgtccggatcgcaggccagcacggatttcacgtcggatccgtccggttcgcggtcggccaggtcgaggtaggtttcgtcgacgatgcgccatgcgccacgctcacgggctaggtcgcacacggctttcagggtgtcgaaggcgatggtggtgccggtcgggttggacggcgaagtgatcatgacggccttggtgcggtccgtccagtattctttgcacagttccggcgtcaggtggaatcgggtggcggcggacgtcggcacgtccacgactttgccgccgaacgcgcgtaccagctcgcggttgcacgggtaggacgggtctgcgatgagcacttcgtcgtcatcgttgaccgtcagcgcggcggacagcagcagtgccgtcgaaccgcccgcggtaatcgcgatgcgtttcgggtcgacgtcgacgtggtgacgttccttatagaaatcggaaatcgcctggcgcagttccggcaggcccatcgccgcggtgtacggcagcggacggccgtcatactgttcgcgcatggcgtcacggacggccggaggagcgccgaagtccggctcaccgaggctcagcttgaccacatcggtgccgttggcgatcatctcatcggccatggctccgaacaccatggcacggaacggattggcaatctgcgcgcgcttcgacaactgcggctgcgcgccattctcaacatttcccatattcctgtttttaccacgtttcgtacaacgccgcctgccgactgtcatttcccggaatcgtccgcctttccggaatcgtccacgatttcgcggtaaagacgttccaaccgttcgtcgcgcactttcttgccgagctcgcattcccagaccacgatgactttccagccgtccgcttcgagttcggcgcgctgcctcgcgtctcgttcgtgattgcgcagcagtttcgcggtccagaattcgacgttcgatttgggcacgcgtgtggctttcggacagccttcgtgcatgtgccagaagcagccgttgacgaatatgatcgtacggtatttcggtagtaccacgtccgggtggcctgggtatcgcttgtcgtttttgcggaatcgcaagcctttggcaaacagaaagctacgtaccatccgttcgatggatgtgtctttgccgcggatgtgggacatggtgtagctgcgcgtgccccgctcgtatttttcgggtttgccggtttttctaggtttgccggttttcttgggtttgccggtttttccgggtttggctgtctgcctgcgatgctctgccgtcacggcttcccattatggcaaaagggccgatcaatcgttttcgcataacgcgtgccgccgtcgcatgtggcgtacgctggtcattgcaacgtagcaaacaggcagttcaaaacaaggagatttcatggcacagatcaatgtggcgattctcggcgcgggccgtatcgcgcagagcatggccgaaacgttggtgaaaatggcggcggatgaccggtaccgcgatctggtcgcaccgtacgcggtggcggcccgcgacggcgagcgcgcagcggcgttcgcggcgaaatacggttttccggtgtcgtacggatcgtatgaggagcttgtcgccgatccgaacgtgaatcttgtgtatatcgccactccgcataacttccatgccgagcaggcgattttgtgcatgcgcgccggcaagggcgtgctggtggagaaggcgttcggcgcgaacacgcagcaggcgcgtgagatattggacgtttcggatgagaccggcatgctgtgcacggaggcgatttggacgcggtatatgccgtcgcgtggcatgatcgacgatatcatcgcgtccggcgtgatcggcgaggtgcaggcgatcgacgcgaatctgtgctatccgaccacggcgaaggcgcgtatcaccgatcctgcgctggctggcggcgcgctgctggacgtcggcgtgtatccaatcaatttcatcgacatgatcatgcataatgcgccgatcgcacgtgttgaatcgtcgatgcaaccgtatgaaaccggcgtggacgcgcacaattcgatgacgttctattaccagaatggtgtgatggccaccgcgcaaagctcgattctatgccattcggatcgtatgggcgcggtgtggggcacgaaggggtatctcacgtgtcagaacatcaacaatgtcgaggcgattgacgtgttcgacggctcgcatgccgtcaccgcgcattatgacgttcccgctcagctgaccggctacgagtatgaagtggctgcggccgcgcaggccgtgcttgacgaacgcaccgaatgcgcggaaatgccgcatgccgatacgatgcgcattatgaagcttatggattcgctgcgtgcggattgggaactcacgtatccgttcgaagcgtaacagagggcttctcccccgccattccataatcgacgaatccacggctgcccgcagctatctgccgctcttcggtaagacggctgccatccacgaatcatagatgacaccaaaaccgcgccaaaacgtgcgctacgcccgtactctacgccatgacggtcaggcggctttcgccgttttcactcacacgcgagacggaaacccgcgcacgcacacggtctttcagctgccccacatgcgaaatgatgccgatgtcgcgtgtgcgggcgatgccgtcgagcacatccatcacatcgtccaaatattcgtccgacaatgaaccgaaaccttcgtcgatgaacagtgtttccatggaaattccgccattttccgcttggatcacatcagcgagtgcgagagccaaggccagcgatacgaagaaggtttcacctccggaaagggtgcttggttcggtggaacgttcggtgcggcggtcgaacacttcgattggaagaccggttttgccgcccgcacgcccttcgtgcgtgccgaggcgcagttcatagacaccgccgtggatgtctttgagcagttcgttggcacggtcgagcacgtcgcggaaacgttcggtcacagcgaaggtgatgagcgacactttctgccccgacggagagtccttatttgcggtggcgagtaacgccatagtgcgtaccggagcgaaatcggtcatgcctgtctgccaggtttgcgcggctttagtaagttgcactgcgattttcgcacggtccctgttcaggtcaagtacagtctgttgtgtgctgatggcgtcgtcccgcttttgcgatgcgttgttttgtgtttcggcgagcgccgcaaaatcaagcgattgcaatagttgcgcagctacttcgatggtgtccacacttccagcaacgtccgtaatcgcaatgtcatgcaacgttttagcgaacagctttcggcacgtttccaatcgttccgtcaaccgttcgcacgcctgcttcatattggcgtcggttgcggcgcacgctttgccgaaatcgtcaatccgcgactgcaatcgctcgatctcatcttcgtccagtgcggcggccgaggccgattcataatccgcgaaatcgctgttttccagcaattgcgcaacagcctgcttcatggtctcgcgttgctcgttcagcgttttaagcatggcttgcaaggagacgttctgctgttccaaagcatcacgttcggcgatgcgcttggatagcgtctcggcttcttgcgctttggctttcgcctccgcccgcttgtgttcagcgtccgcacgttcggcgtccacgctttcctgggtgatgccttccgcggctttcgcagcagtttccgcctggtcggaagccgcttgtgccacagttcgcgcctgcaccaatgcgttgtgcgcatccgtcagcgttttctcagccgcgtcgatttgcttctgccgcgttttaagcgcgcgttgttgctgctccaacgtttccaatccgtccaatgcggtctgcgcgttcgtgacgccttgttcggcagcagcctcgtccagtccgtgcgattgttctcgttcgccgtcaagccgtgcgcgcagtttttccaacgcagctttggcgtccgattcacggtcagcgcacgcggacgcctgttttctcaacgtttttacggctttctcactaagcacatcagctggacgcaccgccaaatgggggtgcgtggtcgaaccgcataccggacattcctgcccttcgtccaaatcttcggcgtatctcgccgcacccgccaatcgcaaggcttcttcggcatgctgaacatccgtttcggcttctgaccgcgcctgccgcgccgcttggtatgcggatttggcggtctcaatctgctcggccagctgttccgccgtctgcgcatgctggagtaccgctttcgcctgcgtcagagcatcctccaattgtccgcgcgcgcccagttttccggcgatttcctccagctgcgacgccgtggcttttgcgtctggcaatgcctctcgctcctgctgcgctttggtttgcgcagcttcacatgcttcgactttctgagatgcttgtttcacctgttcggcagctttcgtagctttccgaaggttttcggcatgcgtttgcgcgatttccagcgccttattcgccgcttcctcgcctgcggcctcggcaacggcctcctgatgccgctgctgcagcgttttcttcgattcgaagtttgccaatgcggttgcaatatccgcaatacgcgcgttgcagtcatccagtttcgcttgcgcggcttcgcattcagcttgttttgccacgattggggcagcctgtcgggcctgtgcgatttgccgacgttgctttgctatgtccggtttgcgagatttcagctcgtcggcgcgattgcgcgcggattgcgtttcctcgtacgattcgcgcagttcacatgcggcttcgttgcgccgctgcgcttctgccagtttgtcgtcggctttgctgacttgcgattccgtctgcgccagcagccgttgcgcatccgcctccacgtcacgcaacgtaacttggagttgttccacgatgtcggtttcgctacgtgccggctcgtcaatggcaccggattcgttcaaaccccagcgccatgcatcaccgcgcgtttccgaggtttcctgcccatccggagtgtccgattctcccgaatcagacacgcaagacccctccagcccactctgaatgtccgattctgcagaatcggacaactggaataccttagccctgtcccacgtgtccgtttcaccagaatcggacacggaaggtcggccggattccaaccgttccacaatccgttccgcattctcgcgcgcggcacgaatccgttcctctagcgcagcccgctgtccgtcgactttatctccgaattccttacgtttcgtatccaattcgtcctgaatagcctcgtattcctcagccccgaacagctccttcaccagtttggtacgatcttccgggcccatccgcaaaaactgcgcgaactgcccttgcgctagcataatcgtcttcgaaaactggctgcgatccaatcccagcagtcgcacaacttccttgcccacttcgcttgcacgggaggcgacagcaactgtatgacctggctcgtcaaggaaatcgaaataccgatcaacggcagccaaaccgccagtcgagccggcatcagccgaaacagccgaatcgtcggtaagcgctgcgaaagccatttcgtaatcgttcgcaacccgcaccattttgccggtcgcgttctgcttcgtcgtaccatcgccacgctgtttcggccgctcgtattcgggcgtgcgtcgcaccgcgtaacagtgcccgccctcctcgaatatcagatgcacgtaagtttcgtcggccgaagcttccagaaaccgcgagcgcagcctgttgcggtcgcccacgccgattttgttctcagtattgctggaaatcgaaccgtacagcgcgaaggtgacgcagtcgagcagtgtggttttgccggctcccgtttcaccgtcgatgaggaacatgtgcgatcgggtcagcgccgcgaaatcgatggcgtactcccctttatatgggccgacaccgcggaatttcaatgcgatgagtttcattgcgcgacctccttgccggcgttcttgcgtaccgtttccatggcatcgcgcagcacgcgttcctccttgtcggtcggtgtgcggccgagcgagaatttcacgaaatcgcgcaacacgtccatttcgtccgtcgcctgcttcagatcggccattttccggctttcttgcgattgcgttcgttgcgaataatcgaaattcttttccaaagcgtgcgtgtaggcacggtcgattttctggtacgcgccgtgcggcaattccggcacttgcaccgtaatcgacacccacatgtttctgtattgttcggcgagcggaccgaggacatcgtccatggtgcctttgatttgcacgaatggcggctcaccggattccacaggcatgatgcgcggtttggcaagatggccgtccgtgaagtcaagtagcaccacgcttttgccgttgccttccaccggcggcgtctgcgattcggagaatgagtatgcgagcagcgatccgctgtaacgcgcctgtggagtgcggtcgagatgaaattgcgattcggttgtcggtttcgtgggaatggtgattttttgtggtctgtgcaggtggccgagtgccagatagtcgaggccggaattggaaaaaagttccgcaggcacgctgtcgacgccgccgacggtgatgttgcgttccgaatcggaggccgtggcaccggatacgaaggcgtgcgccataagcatagcgttcaatttggggtttgccttgcgtcgggcggccaaatcggcggtgatgagctgtaacgcggcgcgtataaccccttcgtgcgagcgacggatggtgttcgtttctctccgtttgtccgattctgcagaatcggacactttagcggacgaagataatacgtccgcgctgttcagcagcccctgcaatgcaggacgcgcaagatcggggtcgaggtaaggcagcgcgtagatcgcaagttgctcgccatccgcggaatcgaccatgatgggagtggcgatgtctgcgatatcgcaacgcatgtgcacgttcggcagcatcagcgcggcggcgaagccgagtcgagccgcggaatcgtggttgccgggcgtgaatatgatatggagcggatgcccgttgacctccatcagtccgagccgttggaacatctcgttgaacaatcgcaccgctccggcagacggtcgcggcgcatcatacacgtcaccggacacacacaacacatccacctgttctcgtttaatcagcccaatcagccattcaagcgccttacgctggtactccagcaaatcgatgcctttgaatcgtctgccaatatgccagtcggaagtatgcagcacgcgcatacgtcaccccttccccgcgttccagaccttcacacattataattgccccgtgcagcggcttaacgtgtggaaaggatcgacatgggattgttgagtatgctgaaaaatgtgttgggtgcggaaagcgtgacccaaccgacgcagcaaacgcgatcctccgcgaaatccacaacacgacccgcgcgaactccgcaatcaaagcaatcaaagcaatcaaagcaacgcacgcagcaaacgcagcatgtgcagcaaccgtcacgtgcattccagcaatcgcaacgcaccacacagcagcgtacgcagcaatcgcagagcaaacccgcaaaacttaccccgcaaccactgctcccggccgaacgaatcgacaaggcacgcgcgaccatcggcaaaatcgaaaaacacgatctaagcgacgagcagatcagcgcgatcgccggctcgggccataacaccctcgtgctcgcgggcgcaggaaccggcaaaaccaccaccatcgtcggttatatcgcatggctgctcgccacaaaacgcgccacttccgaagaaatcctcgtgctgtcgttcactaaaaaatccgcggacgacatgtcacaccgcatcatgacaagtaccggcaaagcgatccgcgcatgcacgttccacagtctcggcctggaaatctgccgtgcatcgaccatcgccaatcgtcccatcatcgccgggcatgcgtcgaacggcgtaatgcgcgccacgttcgaacgactgctcgaacagaacatcccctaccgcctgctggcgttcaagctcatgtcgaaggaactgttcggcaaatacggtgccgccgcgaaacgtgaagatttccaactgccgacggacgactacagtttcaaccagtacaagcagagtctcattgaaagcgcgcagaccatcatccagcacatgcggcagaacaacatcgacatcagcggcatgcgcgagctcaacgaaaggcgcggtggcaagcatatcggccataatcgtgaaatgctgcagctcatcgaaccgctctataacgcgtatatcggcaatttccgcacgacgcagggcatcgattttcccggtatgatcgtcgacgccgttcgctgtgtgcagcgcaacgaataccggcacccgtacaaatacgtgcttatcgacgaatatcaggacatgtcgcggccgcgttacgagctgattcgtgcactgcacgagcaaaacgatttcacgctgttctgcgtgggcgacgactggcagtcgatttaccgtttcgccggcagtgacattcatctcattcttgattttgcggagatttggcgcgattggggcccgacacgcatgtttcagatcaccaccacgcgccgcttccggcagagtctcatcgatgcgagcggtaaattcgtcatgcaggataaaaacctgtatgtcaaacgtttgcataatccgtccgataagaaggaccattcgctgaaagcgttgggcggctccacgcaggaggaacgcttcaacgcgattgtggagcagttgcgcaagctgccgaaagccgcgtcggtactgatgttgggacgttatagaagcgatctgaacctgctgctacgcaacgattgcgacggattgttccagattgacgagcacactggcagcatcgtttttcttgagaaaccggacatggatatcacattcatgaccgcgcacaaatccaagggattgcagcgcgatttcgtgtttctgctgtgctgttccggcggtttgaagggcttcccgagtgcgattcccgatgagccgctgcttggcttgctgctgccggaggtggagcgcatgccgcatgcagaggaacgtcgcctgttttatgtggcgatgacgcgatgcaaaaagaagctgtttttcgtggtcgaccagtcgcgcccgtcacgcttcatgtatgagctacacgatcggatctgtccgaatattttccggggtgtgaaactgcctccgcaatgcccgaattgcggggaagctttgcggctgcgacatgccggctccgatccgtcacgcgcgttttacgggtgcaccggctttccgaattgccgatattcccgggaatgccggtaatcgcgcggttttttcgggacgacgaatccgatgctcccaacttcgaaatttgtccttttttatcaggccgcgtcccagcagcacgcggccggccccgccttgcctagcaaaccaccatccagccaaagccccgaaaaccaatccttttcatacctcggcacccgccgaacaccaaaaaagaggacgctcattacaaacgtcctctttttccggcaatttgtccttttttaaaatcgtgcggtgctttcgcggggaaaaccgtgcaccacaccatcgcctgccaccttctcataaagcagtcgacttaaaatcgaccgcggacgtccgccacgctaactctcttttcaatccaacaacgtctatcctggattcaacaggacggtgagcatatggcaggacgaaacaactggacacgcgaacagaccatgatggcgttcgcactgtaccgaatcctgccttccggaaaatgggataaacgcaatccgactgtccagagactcgcagaccacatccgccgctcgccttcggcggtggcgctcaaactcggcaacctggcctccctcgacgagaacagaacgaccaagggactgaccaactgcagcaggctggacagagaaatatgggaggagtacgcggaacgcggcgacgccctggtattcgaatcatcccaactgctggcatcggcgttgaacggtcccgacaaccgtccagccgcgaacggcgattccgtcgtggagcagatcgtctcgccgcagatcgggtacgaccgtccggccttggtcacgcaacgcgtcaaccagcagtatttccgcaacacgctcatccataactaccatgaccactgttgcatcacgggaatcgcaatcgatccgctattggtagccagtcatatcaaaccatggaaggattcgtcgccgacggagaaagtggccgcctcgaacggcctgctgctgaacgcgttccacgacagggctttcgaccagggtctgatcaccctcgacaacgatttcgcgattcatgtctcgccgcacgtcgagcacacggaaatcaacgacgaatggctgtaccgttacgacggacagcgcatctccctacctgtcgtctgcagcccatcccgagaattcctcgaattccatcgagagcatatttatcaactttgattccgaagcacccctacaattagctatcacagtaatccccgacgaggaggaatatgtctaaaacagcgaaatcagtcaaagcgatttgcaggaaaaacgataagttcctatgcgtcgaatccccggactcaaatgcactgtttttcccatcgattgcagtttccagctttcgcaagcccgatatagaacaggcgctggaaaagcttttggaaatcacaaataatgacgagctcgcaatcagcaggcagctcgccaagggacaaagcacgaatccacgttattatctttgctattgcgattacgaaatcaacttccttgccaacggacagtgcgccgtctggctcactcagcaagagatggcataccacaagtggattccggaagaccagaagatggcagaccttgtcatgtctccgcttttcgaaaaaagtccctatacaacgaagacagcagtccagttacgagccaatgatgcggttggcagaacattggaagaaatcgatttcaacaacaccgaaaaacaagggaataaaagctatccaggcaatgtaattgaacatgtctggttcgaccatcccgccgacaacatttctgcccccgatttccccgaggctgaagtcgagcttaaagtctccccaatcgatatcaagaaaagcaaggatggtccttcttgcattgcaggagaaaggctagtactcaataccatcaattacgccaaagaaagcactgccgatttcaagacaagttcgttttggaagaaaaacagattcattgaattaatgcagtatctgcgtcgaatcgcctcagaaaaagggcagtctgaagataagcgcaaatataagatcgaatatgcccaccttttagctatggacgattttgcagaacccaattttccgcaaaacagtctcctgcctctcagcgaagcgaccatgctcagaatcgaacaggattggaacacgattcatcagttcatagtcgaaaaccgggcggatgaactgaccgaaggtatgaccgacacccttgcagcatgcactaaaggagcgaataacaaacagaaaagcaggcagagcaatggcgcaagagcaaaatccagagcttactgtttcaaacaaagtttcatgacgtcacttttacaaaactatgcatctgacgtccacgaaacgacttctctcatcaaagatataaagcagctgcaaaacagaagctgcgatagcattattctggattatttcaacccttttaaaggaaaatcatttacggaaatcgcggaacaatttcatttcaccatacctaaaaacatatctcccaaacaaactaatttcatgctggttgaccatatgcttggttcaaataccagtatttccaaagaccccaatgatgattacgtatcgtttgacgccgaagagcttaaaggcattcgagtcaaaacgctgccgcttttccatggaaaaccttccgagcaatttaagatccaatccattcccgatttcaacgatctaatcaatcaaaaatgggataccgataactgcgccctgcatcaccttctggaaaccacaaaattcctcgtctttgtttttgacaaccaaaatcccaatgaaaaagacaagaatccagaaaacatctactttaaaggtgccgcattctggtatatgccggcatccgatatcgacatagccgaacaagtttggaaggaagacgttgaaaaactcagaaacggagtgacttttcattacaaaggcaatcgagtttacaacaacttcgttaaagcctctgcgcatcgcgtgattcacatgcgcccggatgcgcacaaatcgcagtacagcaagccggcacccaatgcgcagaattcccgtaaactgcccgcaaaagcacactggataaatagacccgccaaccatgaacgctattcggaagaatatatgaccaaacaggcttggtggattaacggagcttatctctatagccaaataaaagacagactatgaatcatggcataaggggctgcggccacctgcaaggggaaaagcagcagcccctgtcacaaatcagagtcccattaggaaacacttactattccagcgttcgtaactgtataaacatgcaatgctattgctttaagaacgtctcgctcaatgagcacattcacgggacgttccttgaggttttccgaaaaggcaaatcgaatcaggctgttagacgttctccgcaattgcctattatctggatgcctccgaatctcctcggcacgtttcatcaataagtcctcattccagccacaccggctaaggtatctctgaaccttcgatcgctctacaaggacacattccacttccttgaaattctctgggaccatctcacccaatggaatttccttcagttgccccgtctggatgtcccacgtcttaacccacatcaacagatatcggttcgtctccgcattggcattgtagagccatcccggcaccggatcacgatgcccactttgcaatgatgacagctcgaacgaaaacgtcctaagattacggttaatccaatgcaatgctgatttttcgtcaataacaatgcgattgccatgataattgacgattacatccataccttttagctgtcgttttctgtcatgcactcgctcatactcaaaaccagcgtcccgcttatgtagagtctcataaaaatgctcatcaagaaaagccccaagagcttgttcagcgatgctgtcgcttttccgcaaacttgcgaccattacccctgcccctcaattctgccgttcactttttgattctcacgaatcagtttggccacataatgtcgatcgagccagaagcattgcttggtaatcgattcgccattaggcaaacgcacaacgtcatcgctgttctgtcctttcggccttaaatggcagactccgttgaagctcgctccggggagtaaattggttcctcgcccgtaatgcaccgatccaccgctcagcatcaattcatgcagccgctcccagaccggacggacgtactgttcgatatccttttccggcatattccaaaggaatcctccaacaagacggtcattgccggccacatgttgcgaatacggtaccggagattcaaatggaacgatgaagaacttgttctcttcgaaatactcgtacaggaacgagtcttcccatttcgcatcaaaggacgccagcccccgccattcttcctctgtaatctggcggaaagacatgctctccttcggaagcccatccggatacaatacgaccgtcttcagtttggtcacattggccttgcggaattgttcaatcgtatcgacgctacgcccttccgcaccaaccattttcatgacgagccggctcttgctggctttcgaatccgatttcgaaatgcccaatcgaagagcgatgtcatcaacatttctcccgatgtacgggctcatttgttgccacaggaattcagaaagcgtctggttcgacggaatcggcaaactgtattcctcaatgcggcttaccaaagcacgttcggcaatcgacgtcatgaaagatgatttgaagctgaacgcacgctgtttcgcacgtatccgcgccttaccagagccggctggcgcgggagcatctctcatactggaagcattcgcacccttcgtgcacgcggcaagatagtttgtgtccgattccgaaagctgatctgcatgccccgaggcaactttctcgtgaatcgtctcccaatcatctcgaatcgtcgccaaatcgttttcgtcataatgcaagacaacagatttcaagaccttgcagtccaagcgtgattgggttttcttgtcttcgcggtcatcgtagtagtacaccatgatgatgttcttcgacttattccaaaaccgggaatcttcaaaattttccttaggcagattctcgtaattgatgatgtcaaggacaagtctctccttggcaactgtcttcgtacgtttgcccttgccggaatgcttcagtggggtcactttaagctcataacgcgtatcgccaacgaggatatcagcctcagcatctgagttgacaggataatgcagaacggattcctcaatgatattgccaagcgagcccttgtttcccgccgaatcgccacgacctgtttcgtcaagttctcgaaaagtcttcccctcagctgcaatcaacagtttcgtgacttcttccaatgatgaaaaactacgctcttcgttcaacatcgaactagctcccacatctctttcgaggccattccaattcagccccaactcttttgcatttaaccaccgtaagccccttttataaacacgacacactgaatttgatcgattcctcatgattagataagatattggccagtagtatctcgaacgatcgttcggatcgcaagagttaaaggagcgcgagagctgtaatgagcaaggaaatcaaagtcgttgaactattcgccggcgttggcggattccgacttggacttgatggttacagcaatcccaagtatcctgatttcgagatgaagccagccggcaatttccacaccgtctgggccaataattgggagccagatgggcgacccaccaaacaattcgcatggcgctgctacgaaaagcgctttggcgaaggaagctgcgtcaatgaagatatcgcagtcgttgtcgagcaaatcaaaaatggcgaacgtgaattgccggaattcgacatgctcgttggcggcttcccctgccaagattattcggtcgcgaagcccgcaagtcttgcatctggcattgaaggtaaaaaaggcgtgctttggtggagcatcaacgccattcttgaaatgcgccacccgaagtatgtacttcttgagaacgtcgaccgacttctgaaatctcctaccgcacaacgtggccgcgatttcgcgattattctctcttgcctatatcgcttgggctattctgtggaatggcacgtggtgaatgctgccgattacggcatgccacaacgtcgccgacgcgtatacatttacgctgaacatgacgctccaaaatgggatttggaaaaccagctcttccatgtgggggtcgaagcacgagctttccccatcgaaccggatgagcgattcggagctgagcgtttctccgtcagcaaagacccttataggtctacgaaagaattcggcatcggagacaaaatctcacgattcaaggaagccggcgtaatgcagaacggtaaggtgcttacacgccgagtcaagcccatctacaacggcccacagcgtacgttgggtgaattcctcgtaccgatcgagcaggttccggaagaattcttcatcactggagacaatctcaagtcatgggaatatctcaaaggcggcaaacacgagaaacgcaccgctagtaacggacatgagtacgtctactctgaaggtcccatcgcattccccgatccgttggataagccgagccgcaccattctcactggagaaggcggccgtggagcaagccgcaccaagcatgtagtcatgcagaatgggcgactaagaagactcgtccccgacgagttggaccagcttcagcgcttcccgaaaggctggaccaacgacggaatgaccgatggacatcgtgccttctgcatgggcaatgccctcgttacggaaatcccacaccgtatcggcaaaatcattgccgaagacaacgattcgaaacagtaaatcgaacgaattccggtggctgctggacggaacggaacgtactccgacatggcagaattgccattttgcgccgattttcatccgtcgcaaagccgaagaacaggagaaatcctattacttcgtcggcagcgcggtcgcattggacgatgtgcacgcgtcggtgaaccccggcgaggatggcagcgagtcaaaggtggtcatttccacactcaagctcggcaaaccggtcgatccggaactctaccgccacctcaccggcaagtccgccctgtaattcgcgaccttctgacacctatctcgcttatagatggcggatttggatcactgacacatgccatctcgcttatggatggcggttccaacagcaaaaacgaagtttgggggtatgaatcatacccccaaacaagcgatttacttcagtacaccgccatccataagcgagataccagcagacgcacatgaaaatccgccatccataagcgagatagccccgcaatcactccagccacacatcgaaacatataaaagcggcttgtgtatatacgttgtatgtacagcatatatacgcaagccgtccgagctgaaagtagccgaaactacggaaggtcactcaccgaccgtcggcgtagccacccatgtcgggcccatcgaaaccgccgtcgaagccagggccgtcaggacctggaccgaatcccggaccagcaggaccacccggaccgcccaggaattcgcgcgccgacatgccgttctccctacgggaggcatccactgcttcctgcaacaccttgcgaacttcgaatccgttcagcacgttcttcaatgccactacgccattgccggacgactgatcgcgcgtatccagcacaatcgtgctcatgccgaagatgcgctgcaggaatgtacgttccacgctgatatccacgatgcggaacagtttgatcaagttgaaactctcgttcagaatgccggttttgacgctcagctcacggtcggtaagtgtgtacacggtgaacgtgaacggcgtacggcaccaattgcgcttgcgctgctgccacaggacattgccacttgcaaccttcatatggttcccccttttcatcagaggcctaattggactggccgccctatgcggcacagcacaccattctaccgtcacgctcgcacgaacaccgttttatctatcgcacagcgcagacgtttcacacactgtttcacacgtcgttccgtgtagggaaaagagacacttcacagcacgcgcagcagcttacgcagcaactcgcgccgcatccgtcacgtcgcgcacgataacgcaaacacaggcaagcgccgcttccgcggcattggcaccaatcagcaccacaccgtcaaatcagttgtagcccttcacttcgcggaagatgccgctcaaattgccgttgcgtccgtcgaacaccttgccgttggacagcgtggccaaatcgtcgagctgttgcgaatccgcgtcgccgaacatgatggagaaaatcggaacgcccttgccgtcggacgcatactgctgcttgaactcgtcaagcttcgccgtgtccgactgcccgtcggtcagcaacgcgatcgccaccgtgtaatcgtcgcggtcggacggcagattcttcaacgcgacttccagcgcattgtagatgtccgcattgccatttgccacctgattttcgctggcggccagcaaggtcgcggtttgcttgccttgcgcgacctgcgccactttcgcgctgctgttgaaggggatgaacacgttgacgtcgtcatcgcccggctcgatatgcgaggcgcgtgcctgatcggcgtcgagggccgcctgcaaaccggccacggcaccgcttttgcccttgcctgacatcgatccggaataatccaccacccacaaggtgtaagcgggcttgcgcaggacggtctgatactggtcgagcgcctgttcgatgatgtcggaggatggcatggtgatggttttcagcaccgatgaatccgatttgacgccccattccttacggaacgaatccttcaccttcgcatctttggcatacgccagcgtgccgtccgaaccggttctacgacccgcctgttcgaacagtttcttggaatccttcgacgtgatcgacttgctgaatcgcttgaacgcatcctctttgtcctgcctgcgatccacgtaagcaagcggcgaatcggaaatcgcgatgccgtcggacggatagacggccagcagcggctccttgttcttcgccgtcaacgccttgtccgcctggatgacgagcgattcgtagttcaccatggaatcgttcgtatccgggtcgttgacgaccatgtccttcagccagtcggacgagccggatgaacgattgacgcccgacagtacggttttcacggacttacgtaatgaagcatcgttcaaatcgtctttggtgagtgccgacttaccgccgttcagcgccgtcagaaacgccatgtacgccgacgctccggaattcgattgcgtggcggacgtcatagcgaacgacagcttcttggccttcaccgcatccataatgtccttcgtggacaccagcttcgttgtaccgtccgtattcgcccagccgagttcctcagccttgctttgcttcacgccgaacaccaccggcgtggtggacgtggagacctggtccttgacgacgtgcttgatatcccccatggtgatccacatgctgctggccggccagaccgcatcgtaatccctgcccgcgtgatggcctttgttgcgcagcgcgtccataacgtccaacgaccccatgtagtcgacggtcactgacactttcgattgtttggccgcctgttcgatggccccgctcacttccttgttttcggagccggaggcgatgcggatggaatctttggcaccgtccacggaatatgtcgcggttgtgccgctgttcgaatcgccgtccgacgtcgcattggaagcgctgttcgtcgaaccgcatcccgtgaacagacctacgatcaaagcgatgaccccagccgccgcaccaagtttgcgtgcgttcatcttgtgttggccctccgttcatattgcgccaaaaaccgttcagcgcacccggaaaacatttccgaatgcgctgaaaacatgttctgttatgtgcgattgattatagtccgattttaccgaacggccattttgccgtctcattttcgtcattattttcgtacccccctcattccgccctttccgctctcttccacagacgtagccgacgccgcctatacttggtgcggctacttgttgcggcacaatcgcaactatgcaatcacaggcatcgcaacggaaaggtgggcgcatgggcagcttcaatcgcaggcaggaagccgacgatctcaccgactacgtcaataacggatggctcagttccgccgaattcgacgggccgactttcctgtggaatcatctcatccgcgaagcaagccaggaggatgccgcgcaacgcaacgatgtgccggtcgccaatctttccgacgcggacgtggtcatcaccatgcccatgcaatggtatttcgacgccctcgcctccatggtgcccaccgcggaacgtaccgatacgggcgtggagattccacgcatcgatatgccgacgttttcgatcgattcgcaggcgctgtccggcgtggacgcggtggtcggcaacgcggtgatcagcacgcgatggcttgacgcggtcggcaatctcgccaaagctgtggagatgaccgcaaggttcgtcggcaatgtggccgaccgtgacaacgagggtttcgactacctgaaagatctgattcagaccgtacgcgtgtacatggatgccgtggcctgcaacgccgatccgatgacgggcgagcaggcgttgcgcatgatcacgcaggtggcgtgcaatgaggatttccggctcaacgccatgcagatggtggagctgctgtcttgcggactgtcgttcgcgcaatgggatgatacgcgcatgttcgcctatgacgcgttgaacaagggcattgccgcgatgcgtgatttcgcagcgaagtccggtaatggcgatgcgagcagcactactggcgacactatgaacagcgtcggcagtatcgacagtgatgttacgggcgatacgggtgcacgcgacgccaccgcaacgcaatctcacaacctccgtgatacgtcctctgacgcggacaatgcgcatagcacgaatagtacagacgctgcggacggcgcggataccgcgaactcgatcacgcattccacgggcgctgccggcgattccactaccggcggttcacctaccctctcccccgaggaactgaacgatctcgccatgcttgacccatcattcctgtccaaacagcagcttgcgcagaccgcgcaaaaccagttcgaccatgccgtgcagttcctgcggcacgatctgatgcggatcagtggcgatgccgaggaggccgatcgtttcctgcgcgacaaccatacgtccgagccgcttgccgacgcgtacgcggcgcggctgatcgctgccgaacggtggcaggatctgctgaatttcgtcgatctggtggagcgtgacgcaccgaaccagtgcacggtcatgttccccgaggaagtggtgccgtacgaatgggagtcgattcgtgaggccgctttggaggcgttgggccgcggcggagaactggtcgcgatgtatcaggagcggttggatgacacgtacgatcccaacaccgagctcaatcgtatgaagcttcaggcgtggactcaagccaaggaataggcggcgcacggctcagcgcatccgccgccagttcctcatctatcgcaggcttccactctcattcccatcagtatttccaccatcgcttccacaactgacgcgcaacgtggccaattggaacggatgcaggctcagcatcgctccttgcgccgttcttgccacggacggatcaccgtcggcaaaagccgcgggcaattcggcatccagccgcgcatcctccataatggaacactcgcgtaccgtggccttccccaaagcggcgttgacggcaagtctcgcatgggcttcgccgccgaccgcctcataaacgcgcagtatcagatctccggaaccgtcatcggcaagcttgacccagtcaagcaccatgacgccatccaccgggttgagctgcgccagcggatcgaacgccggcacggcaggcagcacggccgcgttgagacggttcgcctcgtcaagcacagccggcatactggcatccgccacaacgttccacgcgaactcatgcacgcccttgtcagtgttcggatcgaggtatagcggggacgacagcaacgaaagtcgaatcatcgtgccacgcaccggcccggaagccgtgttccggtgaatcggcgaaacgtcggaaccgtaggtgctggcgttgacgaccgcagccgcatagccggcatcggcgacgcgtacgaaccggtgcgtgcagctttcgtatttcgcctcgtcggaacgtgtgttcttctgaatgggccgttccaccatgccgtactggcattcgtactgcgcccggtcggcctggatagccatgggaatgtcgactttgaggaatcgttcggatgcccgccaatccactttggtccggaattcaaggcttttcgactttgcccgcaatgtaatgcaggcatcgatggacaccccgtcggtggtgctggacacgtgcacggtggctccgccgcgttttgtctccgtcactcgttccacatgcgagtcatcgatgccttcggcgctgaggaaggcatcgcgctggatgtcccatgcgtcccactcgtatggctcgtcgcggagaagctcgtaatgcccgattccactgccgtcgggcaccagttcgtgtccattatcaaggtcgatcagtgaacggaccgtaccgtctggtgcgatgatggcacgtagcaaaccgttgtcaagtatgattcgaccgtcgtcgcatgtcgttgcgatggtggattcatcggcgaccgcgtcggtgccgttcgcgtcatcatcctgcgttcccactgccgcggtgcgagcaatccacgaatcgccattctttgccgtatatgggacgatggccgcgttcgatcgcatgtcggcatcatcccgcaccgatgcgatggaagcacccgcttcagcggcgatatcacgcagtcttgcgatgtcgcgcacgtagtccgcacgcgcctgccgatgcacccatgcgatcgccgatccgggaagaatgtcgtggaattggttcagccccattcgaaggaatggtgggggaatttcgtggtgtcgttccatgagatcttctgtgtgaggaaccattcgaaaccggcacgacgtgcgatttgcggccatgccccgcaataaccgaaactgtcgggaagccacagtccttttggttccacgccaagatgctcacggaagtaacgcatgccgaacgtgatctggcggatcagcgactcacctgtgggcagcatgttatcggattcgacccacattccgccgacgggaatgaatcgtccttccttgatgcgctgcagcatgcgcgcgaacaggtctggatgttcctgttccagccacgcatactgttgggcggaactcatcgcgtacgtgaaatccggatcctcgtccatcagggcaagcacgttggacaccgtgcgggccactttacggtgggtttcgcgcacgggtcacagccatgcggaatcgatatgcgcatggccgaccgcgacatgatggatgacgctggaatatgcgggttcggataataccccggcaagcttttccttggctggctccagagttccggcgatatcacgctcgtcatatgtgttgagtgatcgttgcagcgctttggccagctgccaatatcgaggatcatcatccttgagttccctcatcagcgaggtgacggtttccaagtccatcagatagtcgaacacgttttggttgaaagcgcacacgtccattgtggtgagcacatagtcggatggacgaccgtcggcacgctcccccagattcatcggcgcgaatggcaggtcagcttcgaccagtggattcgatgcggcctcgacatataccgtgaaacgaccggcatcgtcaagctccacattcgccacgccattggcatcgataagcggaatccagcaattgtctggattcaccgctttgatgacgctgccgtcagggcgatagcataatccttccgcttggaagcccgggccacgatgtcgtttccatcccagatctacaaccagttcgacggctctgcctttgaccgactcacggtcgatacgtccacgaacctcgaaccatgtggtaccccatatcgtgccccaggcaccaggaaccatgaagtcgagaaaatccactttgttttccctgacacgggcaagaaagtcggcgctctgttcgggttcgccttcattggcgaaaagcgcgtaactgacaatgcgataatgtttcgtgcacatatggcacaagtcgttgccgcatcactcgatcggcacgtctgagttgctgatctggaagaagaaacatagctatccccttggcacatgattcctatggtgtatccatggtgccacagcacaatctcaaatcaaaaaacatcaaagagaaaagtggttctcaaagcggacatccggtggagactccggataaggaccttcgacgagcccgaaaggcgttgccgggaggtccgggaggtgatgaaaaaacgggggttcctggagcgacgcccgccgggaagcccggaaagagagcatgaaaaaagggacctcccgggagtcaaaggctcgaccgggaggcccgatacgtttgaagcggcggcgtgctactctcccacaccctctcgagtgcagtaccatcgccgcgcctggccttagctaccgggttcggaatgggaccgggcgtctcaccagggctatgaccaccgcaaaaccgcgatcacggaacgacagccaaaacaaggcggccattccggccattcaattatcgtgtggcggtttgggaaccggctagcggacgcgaggcaaacgcctatcgtttgaatcgtattcgtgaccatcccaacgcatattgccgtccaggacgatccagcacaggaaagacgcggaaccaaccctccacaagaggatcggaattgttgtgtcgccgtcgcccgttagtaccggtcggctccacccctcacggggcttccacctccggcctatcaaacacgtgttcaacatgcgggctacaggatctcgaagatccatggaatcctaatcttggagcaggcttcccgcttagatgctttcagcggttatccctcccgaacgtagccaaccggccgtgccgctggcgcgacaaccggcataccagaggttcgtccacccaggtcctctcgtactatgggcaggcctcctcaggattccaacgagcgcagaggatagagaccaaactgtctcacgacgttctgaacccagctcgcgtgccgctttaatcggcgaacagccgaacccttgggacctgctccagccccaggatgcgacgagccgacatcgaggtgccaaaccatcccgtcgatatggactcttgggaatgatcagcctgttatccccggggtaccttttatccgttgagcgatgccgcgcccgtgcgccggcaccggatcactatctccgactttcgtccctgctcggaccgtcgtcctcgcagtcaagcccgcttgtgcgattacactcgacacccgattgccaaccgggctgagcggacctttgagcgcctccgttactctttgggaggcaaccgccccagttgaactacccgccaggcactgtccctgacaaggatgacttgtcgaggttagacgtcaaacgagaacagagcggtatttcaccttgcggctccacatgagctggcgcccacgcttcgaagcctcccgcctatgctacacaatccgcgcctaacgccaataccaaggtatagtaaaggtcccggggtcttttcgtccttctgcgcttaacgagcatctttactcgtactgcaatttcgccgagctcctggtcgagacagtggggaagtcgttacgccattcgtgcaggtcggaacttacccgacaaggaatttcgctaccttaggatggttatagttaccaccgccgtttaccggggcttgaattcaccgcttcgtccccgaagggattgacggatcctcttaaccttccggcaccgggcaggcgtcagtgcatatacagcggctttcgccttcgcatgcacctgtgtttttggtaaacagtcgctaccccctggtctgtgccacccaccaaagctccccgggctagccggttcaccccagcgggtctcccttataccgaaggcacgggagtgatttgccgagttccttgaccaggattcgctcgatcgccttggtattctctacctgaccaccagtgtcggtttggggtacgggcggccatggccctcacgccgaggcttttctcgacggcctggacaaccggatatcgagccataacggctcccatcatcacacctcgccatgcgcgccatgcggatttgcctacatgactggctgcgtgcttgaccacggaaaaccacctccgcggccggctcccattccgtgtcacccctgcgctgacctactgcggctacggtcccaacgccacgcggcgacaccaacccgaaggaaggaaccaccacgaggcggaggttagtactcaccgtctcggttttgccggtccatggtcggtacgggaatatccacccgttcatccattcgactacgcctgtcggcctcgccttaggacccgactcacccggggacgacgaacgtggccccggaacccttggtcatccagcggacgggatcctcacccgtctctcgctactcatgtctgcattctcactcccacgaagtccacggccggtttccaccgccgcttcgcccctcgcaggacgctctcctacccagcaaccatgaagattgctgccgcgtcttcggtggtgtgcttgagccccgctacattgtcggcgcggaaccactagaccagtgagctgttacgcactctttcaaggatggctgcttctgagccaacctcctggctgtctatgcgactccacatcctttcccacttagcacacgcttcgggaccttagacgacggtctgggctgtctccctctcgacgacggagcttatcccccgccgactcactgccggaatacacgtcaacggtattcggagttcggctgctgttggtacccaacaagggcccgcaagcatccggtagctctacccccgcgacgcaatcgaccgacgctgcacctaaatgcatttcggagagaaccagctatcacggaatttgattggcctttcacccctagccccaggtcatccccccggttttcaacccaggtgggttcggtcctccacgcggtcttacccgcgcttcaacctgcccagggctagatcatcccgcttcgggtccaggacaagcgactacaaacgccttttaagactcgctttcgctacgcatacgccacacggcttatgctcgccacccgccactgactcgcagactcatttttcgataggcacgccgtcaccccacaaggaggctccgacggtttgtgggcgcacggtttcaggaactgtttcactcccctcccggggtgcttttcacctttccctcacggtactggtacgctatcggtcagacaggtatgcttagacttacccaacggtctgggctgattcacgcgggattccacgaggcccgcgctacttgggacaacacgatcggaagacggctcacgtccaggtacggggctggcaccctctacggccaggccttcaagcctgttcccctggcaagccgttttatgactcccgcccggcccgtcggaaccgggacacgtgatcccacaacaccggcaacgcaacccccgacgggtatcacgcgcaaccggtttggtctgatccgctttcgctcgccactactcacggagtatcccttcctgcaggtactgagatgtttcacttccctgcgtaccccccgcccataggcggtgccggcccatgacggccggcgggttcccccattcggagaccctaggatcaaagccatgttggaggctcccctaggattatcgcatcctcaaacgtccttcatcggtactgtctgccaaggcatccaccatacgccctcgcaagcggcacaacagcaaaacaaattgtcattgccccacccgcgggtttcctgatagcaagatcgccagacgacaaatcttaacactaaaatgatcacaaaacgatcgatctcgaaaccaaactcaattgaagagtttggcgaaatcgcgataagcaaaaagaaacgttctttcagtttctcttgctcgcgtccactatccagttctcaaaccaccacgcgccacacgatccgaccagccacccaggaccggccaccacgcatgggcatcgaaccgcgccacagaaaaaacctgtggggtggcggtccgggagcccaaaagcatacccataccactcccggacgggatcccgacgggacatccaagcccatgatctcttccacaccagcatccacactataaggcatgactgtcacgccatcgtgtggcacacactgtccaaaaaacattggactgaattctccgtagaaaggaggtgatccagccgcaccttccggtacggctaccttgttacgacttagtcccaatcacgagtctcaccttagacggctccccccaaaaggttgggccaccggcttcgggtgctacccactttcatgacttgacgggcggtgtgtacaaggcccgggaacgcattcaccgcggcgttgctgatccgcgattactagcgactccgccttcatggagtcgggttgcagactccaatccgaactgagaccggttttaagggatccgctccccctcacgaggtcgcatcccgttgtaccggccattgtagcatgcgtgaagccctggacgtaaggggcatgatgatctgacgtcatccccaccttcctccgagttgaccccggcggtcccccgtgagttcccaccacgacgtgctggcaacacagggcgagggttgcgctcgttgcgggacttaacccaacatctcacgacacgagctgacgacgaccatgcaccacctgtgaacccgccccgaagggagaccgtatctctacggctgtcgggaacatgtcaagcccaggtaaggttcttcgcgttgcatcgaattaatccgcatgctccgccgcttgtgcgggcccccgtcaatttctttgagttttagccttgcggccgtactccccaggcgggatgcttaacgcgttggctccgacacggagaccgtggaatggtccccacatccagcatccaccgtttacggcgtggactaccagggtatctaatcctgttcgctccccacgctttcgctcctcagcgtcagtgacggcccagagacctgccttcgccattggtgttcttcccgatatctacacattccaccgttacaccgggaattccagtctcccctaccgcactcaagcccgcccgtacccggcgcggatccaccgttaagcgatggactttcacaccggacgcgacgaaccgcctacgagccctttacgcccaataattccggataacgcttgcaccctacgtattaccgcggctgctggcacgtagttagccggtgcttattcgaaaggtacactcaccccgaagggcttgctcccagtcaaaagcggtttacaacccgaaggccgtcatcccgcacgcggcgtcgctgcatcaggcttgcgcccattgtgcaatattccccactgctgcctcccgtaggagtctgggccgtatctcagtcccaatgtggccggtcgccctctcaggccggctacccgtcgaagccatggtgggccgttaccccgccatcaagctgataggacgcgaccccatcccataccgatgaatctttcccagaaggacatgcatccaactggagcatccggcattaccacccgtttccaggagctattccggtgtatggggcaggtcggtcacgcattactcacccgttcgccactctcacccaggagcaagctcctgggatcccgttcgacttgcatgtgttaagcacgccgccagcgttcatcctgagccagaatcgaaccctccacaaaaaaaccttttcatgaagagacatcgacacgatgactctcgaaataagaaaattgacgatcgccttataaggaaaggcgcatcgcacaaaaacctcgccgccgtttgaccgatccctcggcaccacgcgtcagcgtggccggcaacgaactggcaatcattgactataaagaagtagtacaaatacgctcttgagttctcaaaccaccaccactcacccacctcgcggaccggaaccatccggaccactcgctgagcggcagcaaaagataaacttacagcacgatcgcgatccgcgcaacccgggccacatgaacaacgcgtgaaccgttggaaatccaacgttccatcggcgtgtcgaaacttgacaaaccaggcccgaccaaccccgcaaccaccgaaaccatccccgcaatcgcccattccatccccgcaaatccgcaatcgcatccgcattttgtaaccgcaaaacggcgttacgggtaacaaaagccggaagggaaagccaaaacgggacggtcacgggaagaagaaccaggaaactgcgacacgaatcgcaaatgctaccagcggcgcccgcaatgcttgccaccgatgccagacttgccattcgcaccccacggaccgcggccttcgccatgcaatacacccaagtgatgtttcatggcaaccagcatgatatgcgtatcttccaaaccgaggtggcgctccgacttgctttcatcgagcgcgccctgccgcttggcgtatgcgtccaacgtgttattgccgtacggatgctcgccgtccggaattgacccttcatcccaacggcggctcatcggcaacgtgtcgataatcgtaatcttgcccgcacggtagctttccgcatatccagccacattcaacatgaagaagctatgttcgaaacgagcgttgtgcgctacgtacggttgctgctccaatcgctgcagcaaaccgatttgagcctccggccactcatcgaacaggcggaagccggacgcacgatcacgtacatcgataccggtcaaatcgagaatcagcggattaccgagcgtcgcgttcgcggcaggaacgccgaacgacagacgcgactgaccatacgcatcgcccgtttcgtaataactctgctcgtattggtatccagtaggtgcggcagcagggcgaggggaaatcatgttcatatattcaaagccgacgtcgatgatgtacacacgcgccgggtcagtaccggtggtttcgatgtcgattcccatgacattgtccacatcgcgtccaggaagataagcgtcgcgccaatccgatttgcggtattcagccatccgacgcaactgcgccgcttcagcggatttcgtttccgaaccgtaatcaaacaacgtggagccgcccggactggttactccactcaggttcgcacgcgacatggcatagtcactggctcgcttctgacttttctctgcggcacgacgggcggcgcggccgttaacgatgtcagcggttcgatcttgaatatcatccaacgccactcccccggaagccaaagccgaaccgggcagcagcaccggaaccgtcacgcgctcacgtcgttcctcggtgaccgtccacaatcccatcgccacgccaatctgtcgcagaacagcgatttcgtcgcacaaccgacggttcgcgtaagcaagcgcgcgcggcagccgataggaagcgataagtcggtcgtaatccatcatgaacgtgctgttgcactgcgcgatggtcggttcgagccgatctcgaatcgcaagatcatctttcaacagggcgtgcagctgcggggcggaaagttgcggcgacgaggaccgcagcattgccaacaaatcaacgtgctgtcttgtggcggcaccaatgccgttacgcaggtcaagggaagacacccatcgccagtcgatcggctggttgtcggcgtcattcggcatcgatgccgaccattgttcgatgtcctgcttcgcgtcatccagccaggaaagattcatcgtcgattcgttcatacctgcccatcgtagccgatacccaccttcagcgtgtaagaatgtgcaacaaaccaacgtgcgcattcctctttgtgagaacacaaccatgcgagttcgaatgacggtgttcattacgaaaccgcgcgcggatacctccgtgcgaagcggttgccatacgaattttcacatagcgcaaatgtgaccatttcccagcaaaaatccagaatcgactttcatttttgaatcccggaacgcaataaacgttccaaatcaacgaaaggaactgcaatgtcagaaacacattccaccactgaaaacaacaattcgcattgctgcgacaacacctgcggcaatgccgacgaccgcgttgttcctgacagcgtggaaatcaatccgctgttcgcccgtccgaaggaagcccaggcgttctcgaaatttaccattccacagaagggtagtctgccggaaaccgcctaccaagtggtgcatgacgaggccatgctggatggcaacgcgcgactcaatcttgcaacttttgtgagcacgtggatggacgatcatgcgaaccgcctgtacatggaggcggccgacaagaacatgatcgacaaagacgagtacccgaaaaccgccgaagtcgaatcgcgctgctggcacatgctcgccgatctatggcatgcgcccgatccaatgaatgccatcggaacctccaccatcggctcgtcggaagcttgcatgctgggcggactcgcgttgaagcgccgttggaaggaagcccgcgaaaaggccgacctgccgaccgatcgtccgaatctggtgatgagcagcgccgtgcaggtgtgctgggagaagttctgcaactatttcgacgtggaaccacgctatgtgccgatttccgaggaccacaaagtgctcgacggccatgatctcgacaagtatgtcgatgagaacaccatcggcgtggtggccatcatgggcgtgacctatacgggtatgtatgagccggtcgaacagatcagcgaagcactggaccgcatcgaggagcgcaccggacttgatgtgcgcatccatgtggacggcgcttcgggaggcatgatcgcaccattcatccagccggacctcgcatgggacttccgcgtcaagcgcgtttactccatcagcacctccggtcacaagtacggtctggtctaccccggtttgggatgggtcgtatggcgcgaaaccgctgacctgccggaaagccttattttcaaggtgagttatctcggcggcgaaatgccgactttcgcactgaacttctcccgtccgggcgcacaggtactgctgcagtactacatgttcctgcgtttgggattcgacgggtatcgaagggtgcagcagacttcgcatgatgtggcgaaatatctgtcgggcgagatcgagcagatggatgattttacgctgtggaacgacggttccgacattccggtgttcgcatggatgctcaacgacaagccggatcgcaagtggaatctgtacgatctgcaggatcggctgcgcatgaagggatggctggtgccggcttatccgatgccggtggatctgacgcaggtgaccgtgcagcgcattgtggtgcgtaacggtttcagccacgatatggccgaagcattcatcaaggatttgaagtcgtgtgtgaagtatctggacggactgcgttcaccaatgccaagcgaggctcgtgcatccggattccaccactgatatttcgcggtcattccacgaattccatcgtttcccgcattaaggaaattcatgttcattcccacaacgattatgtttacgaaagctggctgcaatgacagttcatatgaaaaagccgcttgctgtggtagcgcacgatgcaagcgcagctgcacatcccgggtccgcacgttccacgacgaacgctgcgacggcaccgacaacaacgccacgcaatccgtctgccgtcgcaggaaaccgcaatcgtacgggcatacctgcgcatgccggggcgaatagagggaacggcgctgacgggcacggcgcaatcgcaagcacggcaaccgttgccaataaaaccggcaaaaccatgatgacagtcagccaactggcgatgttgaccgtggtggcggtggcctcgctacgctctctgccggccatggccgattatggtctcgcttccattctgctgtatctcattccggcggtcgttttcctggtgccgaccgcgctggtggctgccgaactggccaccggctggaaaggtggcgtgtacgtgtgggtgcgtgaggcgttcggcaatcgcatcggatttctcgccatttggctgcagtggattcagaatgtggtgtggtatccgatacagattgcgttcatcgccgtcagcctgtcgtatgtgttcggcatgggtggcttgggcaataatggcgtatatgtggccgcggtgatcatcgtgttgtattgggcaagcacgatggtggcgttgcgcggcggcaatctgttcgccaaggtcgggtcgatttcgggacttatcggcacgctgtttcctgcgttgctgcttatcgtcttcggcattatctggctggcgatcggtaagccagtgcagacctccctgcacgcatccgcgctgcttccgccgtggacgggcatcgcgtcgattgtgctaatcgtatccaatgtgctcgcctacgcgggtatggaggtcaatgccgtgcatgccaacgacttggagcatccgggacgtcaattcccacgcgccattgcactagcgaccgcgctgattctgctggtacttgtgctgccgactttggcaatcgcctttgctgtgccgcatcgtgagctggggctcatcgacggcatcaatctggcgttcagggagttcttcgaccattttggcatgggttggggcactccggtgatttcgctgctcatcgcgctaggcgcgttcgcttccgtggtggcttggatagctggtccttctcgcggtttgctagcggccgcccgcacgggactgatgcctcccgcgctgcagaagcgcaatgcccacgacgtgcaggaaggcattctgattccgcaaggcattatcgtgaccgtgctggcgttgctgttcgtgttgatccccaatggcaacacggctttcgcgacgctggtggatatggcgaccgcgctgtatctggtgatgtacatgttgatgtttgccgccgcgattcgtctgcgcaacacccatccagaagtccgccgcacgtatcgagttcctgcgattcggttggtcgcgggcgtcggtttcgtcgcttccgccgcggcattcgtgttgactttcgtgagaccggctggtttcaccggtttggatagcgtttcatatgcgattcttgtggctgtagtcgtgcttgtgctcggtttaccgccgctggtgttgtatggaatgcgcaagcctggctgggatctgcgttcggatgccgagcggaacacggatacgtacgatgtgctagtgaatccggaatactgaaatattggaatatttggaatactcatgtttcgaacattccaataatcccgaatatgatgaatgcctcccaagtgttcgcctgggaggcattcatcgttcttgtctcgttcgtttacgcgattacagttcgaagccgagttcggccgccgcttcggtcggtaccggatcctcgcaccagaaatcctcaaggttctcattggtggtcaggcttcggatttcggcctggtcgatgtacagttcaccgctcaaatggtcggtttcatgctggaagatgcgggccggccagccgtgcagatgttcctcatgcttgttgccgtcctcatcctgccaacgggcggtgatgtcaagccaacgcttgcgtacggcctggtaaccgtcgaagctcaggcagccttcgtagaagctgcgggtttcggtgccgatcggctcgtagctggggttgatgatggcgtggaaggggaattccgcagcttcgcgcggatcgccatcgtcgccttcgcatacgtggtcttcgacgacggccaaagccagaccgagaccgatctgggtggctgcgaggcccacgcccggcgcttccagcatggtggtgcgcatggtgtcgatgagcttgtcaagcgttttgcggctcaactggccgtcgtaggcgatggtctgctggcgtaataccggttcgccggcctgcacgatcggcatgattttctctttgccgccggttttgatgagcttttcgacctcgcggttgagttcgaggtccactttcgagttgtgtccgaacatggggcatatctccttgcgggctcttacagggtgagttcgtcggcgacgaccttggcgaggcgatcgcacacttcgtctgcctgctgctgggtttcggcttcggccatgacgcgcacgagcggctcggtgccggacggacgcagcagcacgcggccagtgtcgcccagcagcttctcttcgcgttccaccgcggcctgcaccttggcgttggtcttggcggccatcttgtccacgttcggcacgttgatgagcgtctgcggcagctgcgggaagtcggcggccagttccttcaggctcttaccggatttgacgacctcgttgcacagggtgagcgcggtcagggtgccgtcgccggtggtggcgaattcacggttgatcacgtggccggactgctcgccgccgagcgaataatcgcctcgcagcatctcttcaagcacgtaacggtcgcccacgttggtctgcacggtcttgatgcccatggaacgcagggccaacttcagaccgaggttgctcatcaccgtcacgacgagggtgtcatggttgagcttgcccgcgttcttcttggcgcgtgccagaatgcccatgatctgatcgccgttgaccatgttgccatcctcatccacggcaaggcaacggtcggcatcgccatcgaaggcaacgcccatgacggcgccggaggccttgaccatggcctgcagctgctcaggatgggtggagccggcgttcttgttgatgttgtagccgtccggcgacgcgttgatgacggtcacgtcggcgccggcgcggcgcaaggcttccggagcgaccacggacgtggcgccgttcgcgcagtcggccacgatcttcaggcccttcagcggcgtcggctgcgacttgtccggaccgaccggcgcgatggcggaaaccagatggtcgatgtacaggttggttgcggtggcggtgtcatggctgacacgacccacgccggcgccggtaggacgatcccaatcctggccgagcaccgcttcgatctcgtcttccttggtgtcgggcagcttgaagccgccgcgggcgaagaacttgatgccgttgtcgggcatcggattgtgggatgcggagatcaccgcgcccatttccacgttgagcacggacgtcaggtatgcgacgcccggcgtcgggatgatgccggcgtcgatcacgtcgaagccgccggcggacatgccagcggacaatgcggcggcaaggaaatcgccggaaactcgtgtatcacgaccgaccagcgcacggcgacggctttcgaattcgctccgctcgtcatcgcccagcacacgcaccgcggcgtcacccaaatcgagcgccagctgtgccgtcaaatccctattcgccaatcctcgaacgccgtcggttccgaacatacgtggcatgagtctcaaatcctcgctatctgcaaacgatatttccgtgacctatcgtactcaaccgtgccgccgaaaccagcaggtgacgacgcaatcgcataacacttcacaattcaaagcatttcacggcgcgcaatgcccttttcgtgtcgcacgactttgatttcaaggcggaaaatcaagtcgtgcggcaacacttgataaagaaataccccctaactatcattttccgttgaaaaccagcaaaaaataagagttagagggtatgaaagccagcacgcttgtcgcacaactttgaaaaatgcctccaaaatcaaagtcgtgcgacagccttcgacgcaaaatgccccctaatccttattttcaagcggaaaacgaggattagggggcataaatgccgatatgcccgtcgcatgactttgaaaatcgcacccaaaatcaaagtcgtgcgacgacatgacggctcttaagcgggaacgttcctgtcgcccctgctatcagagcgcggcgttgaagtcgcgcactttcaacgtgcggtgagaagcctcgacgttgccacgcacaatgcgctgcaaggcgttgtccgcgtccttatgggaggcgagccaggcgtcgcccagctccacgagcttcgccggatcggcatagcccggatacaggccttcgagcagcgcttccgccatgtggaaggtcttgtgctcccaaatccagtcggcgacctcgaaatacttctcggcgtacggttcggccaagtcggcgcgcggggtggctgcgaagccaccggccacagcctcaagctgcatgttggtcagctcgtcgttgtgcagggcctcgttccaagcccatgccttcgcttcggcggtaccggccacggcgcgtgcgccataggcgaactcacggttctcggtggtttcgcgcttggccagttcggcgtcgattcccgcctggtcgatcgcgttgacggtgctcagcgcgttgatgatggtccagcggaagttgttgtcgatttccagaccgtcgaatgccacggaaccgtcgagcaggcccttcgcgttggcgacgaacgcctcgtcgcccggctcgccgtagcccaggtaggcggtgacgagctggaactgttcgtcggagccggccttggcctgacccgccagcttgaacagttcggcggccacatgcttcacgatctcggcacgctctgccggagcggtgtaatgccatgcggtggtgctgacctgtgccagcgcgtaacggaaggtggtggactcgtgttcggtggcgagcgcggccagcgaggtgtcgatgaactggcgtgccggcagttcgccgtcgcgggtcatgtcccacagggcgagccagatcacggaacgggcgagcgcgtcgtcgaagcggtacaggttgcttgtcgcgaatgcgaggctcttgtcgtcgaaacgcagcttcgtgtaggtcaggtcgtcgtcgttcaccagaatcagcgacggacgtgccttgcccgcggccgcgtcgacgaccgtcagttcgccgtcgacgtccagttcgaaacggtcggtgcgcacgatcttgccggtttccggatcctcgttgtagaagccgacggcgagacggtgggcgcgcagcacgggatgctcggccggagcggtctggcgcagggcgagacgcttgatggtgccgtcctcgttctcttcgacttcggtggcgatggtgttgatgccggattcctcaagccactgggcgctccacgccttcaggtcgcggccggaagtgagttccagttcggcgagcaggtcggcgagggtggcgttggagtaggcgtgcttgttgaggtagttgttgatgcccttgaagaacttctcacggcccacgtagtacacgagctgcttcagcacggaggcgcccttggcgtaggtgatgccgtcgaagttgacgtaggtgtcgttgaggtcgttgatcggggcgacgatcgggtgggtggtgctcagctggtcctgattcaacgcccagctcttttcgccggagctgaaggttgcccaggcgtccttccattcggtggcttcggcggtggcgagggtggacgtgaactcggcgaaggattcgttgagccacaggtcgttccaccacttcatggtcacgtagtcgccgaaccacatgtgggcgagctcgtgcagcacggtgaccacacggcgttccgcataggcgtcggtgaccttggattcgaacacgtactggtcgcggatggtgaccatgccgatgttctccatggcgccggcgttgtattccggcacgtagatctggtcgaacttggcgtacgggtacggcacgccccaggtcttggcgtagaaggcgaagcctttcttggtgatgtcgaacaggtagtcgacgtccttgctgaaggccttggcgagcgcctggcggcagtacatggccatcggcacggtgcggccgtcctcattggcgtattcggtgtgccattcggcgtacggtccggcgcagatggcggtgaggtaggagctcatggtcggggtcagctcgaacacccacagcttggtggtttcggcggcgtgatcgccgagcgtgccttcctcggtgacggtttcgttgtcggtcacggaggaggtgggcatgttggacgtgacgatccaggatttggcggcgagcacggagaagtcgaacacggccttcagatcaggctggtcgaacacggcgtagacacggcgggcgtccggcacttcgaactgggtatacaggtagacgttgccgtcggacgggtcgacgctgcggtgcaggccttcgccggtgttggagtactggcacatcgccttgacggtaacctcgttgtgctccttgaggcccttcagctcgatgcggctgtccacgtacgcttcagccgggtcgagggtttcaccgttgagggtgatttcgctgacttcgttggcgatgaggtcaaggaagcttgactcccccggcttcgcgtcgaaggtgatggtggtttcggagccgaaatccttggctccgcgggtcaggtcaagcttgaccgtgtaatggattggcgcggcgatgatgcttttgcgttcttccgcttcgattcgggtgaggtttgctcctggcatgtcactccttctttctggtaacagaaggcggcgcgatcagttgtgccgatcacgtcgccttgattcaatttatggtaaatttacggcttatttcgcggcgttcagtcccatcgcgtcgtccacgtcctgcgcgatgtcggcgacgacggggacgatcatcggcttgcggtgcagctgtcgtgccacccagccgccgagcgtgcgtcgcatgatctgctgcagcttgtaggtgtcgcgcgtgccctgcatcatcgcgtcctgcagctgctcgacgatctggtgacggaccttgtcgaactcgctttcgtcttccgcgaccgcgttgaggtagatcttcgggccggtgataacatccgcggtttcggtgtcgacgaccacgaagctggacacgaagccttcggtgccgaggatgcggcgcttctcgagttcttcgtcggtcagttcgccgacggaatcgccatcgacgtagacgtagccgcacggcacggagccaacgaccgcggcctggccgtggtacaggtcgacgacgtcgccgtcttcggccagcacgacgttctgcggatcgacgccggtcttgacggcgatcatgccgttggccaccaagtggcggttttcgccgtggataggcatggcgcacttcggcttgacgatgttgtacatgtacagcagctcgccttcgttgcagtggccggagacgtgcacggcggcgttgtctcggttgaccacgcgggctccgagctgcacgagcttgttgatgaccttgtagacgccatgctcgttacctgggatcagggagctggcgaggatcaccgtgtcgaactcgttgatggtgatgtcgcggtggttgccgtcggcgatgcggccgagcgcggccatcggctcgccctgggagccggtgcacatgtagacgagcttgtcgtcctgcacgtcatgggcctgcttcaggtcgatgacggtgtcctcgggcagacgcaggtagcccagatctgctgcgatggacatgttgcggaccatggaacgtccgacgaacacgaccttgcggccgtacttgtgggccgcgtcgacgacctgctgcacgcggtgcacgtggctggagaagctggccacgatgatcttgcgcgtggcctgtgcgaacgcctggtcgagcgccggaccgatggaggtctccggcttgacgaagcccgggacctcggcgttggtggagtccatcatcaggaggtccacgcccttttcgccgagcttgccgaattccaccagatcggtgatgcggtggtcgagcggcagctggtcgagcttgatgtcgccggtgtcgatgagcgagccggcgggggtctgcacgaacacggcgagcgcgtccggaatggagtgcgtgacgttcacgaattccaggttgaacgggccgaccttgagcttgtcgcgtcccttgacctcgacgagcgtcgggttgatgcggtgttccttgcacttggcctcaacgaaggcgagggtgagcttggaaccgatcagcggaatgtccgggcggagcttgagcaggtacggcacgccaccgatgtggtcttcgtggccgtgggtgagcacgagcgcctcgaccttgtcgagacggtccttgatgtagtggaagtcaggcaggatgaggtccacgcccggctgctcctcttccgggaagagcacgccgcagtcgatgagcaggatatgcccgttgtattcgaccacgttcatgttgcggccgatctcacccagaccgccgagcggcacgatacgcatggagcccttgcggtacttcggcggggcgatcagcacttcgtcctgctggggcgcggtggattgcggcgcggaatgcgacgggcgacggttcgaaccgttgccgccacgggatccacgggagccgccgttgcgcgagccaccgttgccacggctgcgggtggaggacttggccttcttgatggcggtcttctcggacttcgcggccttggtggtcttggatgccttgactgcggtttcagtgcgcttggcagccttgctgccgcgcttgtgtgttgttgtctttgtggtttcttctgtagccatttcctagttggatttctattactaattgtctccgcctatgcggaaacgaggaatttgggtgcctgccggcgttcatgcgcgacaggccagtcgcatcatgcgattcggttcacagcagtcccgcggcgcgcatgcccttttccgcgcgcacgagttccgcttcgcccggaccgacgttcggcaggcgcatttcggtggagtcgaggattccacgcaccttcagcgaggctttggccatcacggcctggaagccattgccgttcatcgcttcgacgagcggcgccagctgcacggagatgcgctgcgcttcgtggatatcgccacgatcgaacgcgttggcgaggtcacgcatcggaccggcggccgcgtgcgcgatcacagagatgatgccgacggcgccgacggacaggaacggcaggaacaggccgtcatcgcccgaataccaggtcagaccggtctccatgcgcttgcgcaccgcgcctgcgatgtcgccggtggcgtccttgacggccttgacgtggtcgagttcggccatacggcggtaggtttccagctggatgtgcagtccggtacggcccggcacatcgtagacgatgatcggcttgtccgcggaatcgttgaccgccttgtagtggcggaacacgccttcctgcgacggacgggagtaatacggggcgaccacgagcaccgcgtcggcgcccgcctcctgggtctgctccaccatgcgcacggtgtgcgcggtgtcgttggaaccggcgccggaaatgaccggcacgtccacgacttccttgacggcctggaccagttcgaccttctcctccatatgggtggtcggcgattcgccggtggtgccgttgaccacaagaccgtcggcgccgtccgccacgagctgcctcgccagctgttgcgcggcttcgaaatctacggctccgtcagccttcatgggggtgaccatggccggaaggatacgtccgaagggagcaggatcgagcagatgcatagtacgcgtcagtcttagggcttgtcatacggctaacggtacttccctctgcggacgctttcgatttcatgagacgcgaaaaatcacattttggaaggcttgccgacgacgaccgcgacgacgcattgcaggaaagcgacgaacgtgaacaccatcagcggcacatgatggccgccggtggcctggaccagcacgccgaacataagcgggccgagcgaggcgatcagatagccgaacgactgcgcgacgcccgacagcaccacggtttcggcgctgtcatgcccgcgcagcgcgatcagtgcgagcgccacgaccagcgaagcgccctgcgcgcagccgccgacgaacgcccataccggcatgagatgcggcagcagcagcatgccgaggccggcgatcagcatgggagcgctggcggtgagcgccgcgcagacctggttgccgcgcacgttcatgagcttaggaatgaccaagccggaaaggatgccgatgccttggaagatgaacagatgcacgccggcggtggaggcatcgtagccgatggatgcggagatggacggcatccaattggacatggtgtagaaagcggatgattgcagccccatgaaggccgtcacgtaccacgtcatcggacggcgcagcacgcgggtgaacacgccatgcgacgattgcgtggaacatgccggtcgctgtgcggaatgcgggttttgtgcgttggccgtcgtgctgcgatcgccaatatcatcgatatcgccagtatcgctggtttcaatggtgccgccggcggaagcgataacgactttgcgattgtgcaggatacgcaacgcccacagcgcggcgacaaccagcggcggcacactccagaaggcgagcgacgcgcgccaaccgccccacatctgcgcaagcggcgcggacagcaaacctgcggtggcgctgccggcggtgatgcaaccggaatagacgccggtcgccatcgcgacatggccggcatagtcacgtttcgcgatcaccggcacaagaacgttgccgacggcgatggcggaggcgaacaccaccgtgcccagccagatgccaacgccgccgccgaacgagcggatggcgtcgcccgccgcgatgcacagcagggccagcagaatcgacatgtcgatgccgatgcggcgtgcaaggaacgtgaccagcgggctgaccgcggcgaaggcgatcagcggaatcgccgtcaatacgccctgcacgccctcaccccacgcaaggtcggttcccatttgggcgaggaccggcccgacggcggcgatggcgggccgcagattcagcgatacgaggaagatcaaagccacccacaatccggtggaggaccggtcgtacgccagcatgtttcgttttgaattcattccgttcccattcccgcttccacttccgtttaccgccgttccaacgggacgtgccgcgcctagattttccctatcaatcttcaagctcatcgagcgcatcgaagcaatcgttgatgccttcgatacgcgcgtgcacctcgtcttcggtatcgacgaggcattttccgacttcgtccaccatcagggcgatcagggcgaacgccgcggtgaagctcgtcagcacgtgggagttcaacaccactttgaagaaggcgacgttacggccgatgacggcgttgcgcgccgaaatgtcgccaatcaccaccacggtcaggccgcgctcaagcatcacgtcgatgagccgcgagaagaagggaagacgccggcccacgccgatgatgacgattacgtcgcctgccgcataatcaaccagatcttcgcctatggactggcctggattcggcagaatatcaacgtttccgcgtagccgcatcagctgttcgcgcatgtgcagcgccacgggatagctgctgcggtacccgaccaccgccacatgcggggccgtggccatggcttggcatgcggatgacagttgcgcgcggtcgatgccttcaaacgtgcgtttcaggctttcctcgtcacggcgcagatggtcggcgaccaaatcgtcgcactgggtgtgccgtgaaagctccggagagccaggacgatggacgcgacgcacgtcacgtctgaattcgcccgcgttcgcatagccgagcttgcggtacaggcggctgagcgtcggctgcgagatgccgctcaactgcgacaattccacggaattgcagaccagcacgtcggttagatgacccagaatgaactgcgcggcctcacgttccgtcgcagtcagcgaatcgaaggattcccggatgcgcgccaccaagccgaggtccgcggcagcattgccttcctcgtccatggcgtccttcgaagcccccatattgtctgaaagcataattccagaagtcacgctcatcgcccttccctgcagtacattctcacgcggcgcatccgctctcctgacgatgctaccccttgctttccgggtttcaccaggtttggccaccgacaactgttacgacgaatgaagaatttcagatgccgtaagcactgaaatgcatccatcacaggcaatggcggcgcctcttggcaacgcgacccaccatcaggagatgaccgaccatggcaaaaacagcttaccccacacaatcaacatcgcatatcgagcggattcggcatagaagaaacggtgccaaaccagcgaaatgggcgactaacgcggcaacaaaatccccgactgttgcgaacactgttgaacgcggcatcgcgcccggccgaatgcgaggcgaacgcggtgcgcaagatcgtacggctggtggcacgcaccggctgccgcacgcatattctgcacgtgtccagcggtctgagcgtggacgtgctgcggcgggcgaaggccgaaggactgccggtcagcgcggagacctgtccgcattacctcacgttggattgcgaccatattcccgacaacgccaccgcggtcaaatgctgtccgccgattcatgatctgcatgagcaggacgcgctatgggcggggcttgccgacggcacgttggatggtgtcgtcaccgatcattccccggccagcgcggatatgaaagccggcacgctcgccaccgcgtggggtggcgtttccagtctgcaggtcggattccgcgcggtgttgacgggtgcgatgcggcgcggcttgagtttggccgacgtcgtgcggtggatgtcgtgcaacaccgcacggcttgtgggacttgacgatcgtgacgatataacgccggtattgcgggccgatttggcgattattcgcccgtacgaacggtttgttgtggatgctaccgctttggaaagccgcaatccgatctgcgcctgcgatggcatgacgcttaacggcgtcgtcacgcgcacgtttgtagcggggcgggacgcgctctccggagtgcgggaggggaatcttatcgttcgtccgtgaatcggaatccgtaaatcaaccattcaacaaaaatccccaacccgccgacggccggatgtcattcgatgtcggcagattggggacggacgagaatcaggtctcagcccaggtaggcggccgggttctgggcgaacttgtcggcgcaaccggggttgcagaagtagtaggtgacgccgccgtattcgcgggtcgcggccgcggtggccggatcgacgctcatgccgcaaaccggatccttcgcaacgttcgccgcggaatcgcccatattcgaagccatgccgtggccgtcatgaccgccgcagcagtgtccggcgcccatcgcgcccatgttctcggcttccttcttggccttgtgatcgctgaacagtcccatgatcgttcctttccgactgtgctggttgccattatttttgctcggatcgggcttgcgtacccgatacgtcttgtttttcgccgcctccgcgtccggatcgaacaggcgcagccggcttgcgttcgtcaccacgcacaacgacgagaacgccatcgcggcgccggcgatcatcggattcagcagcgttccggtgaacggatacagcacgccggccgcgatcgcgatgccgatgctgttgtagccgagcgcgaatccgaggttctgcgcgatgttgcgcatggcggcatacgtcaggtcgagcgcgtgcacgagtcccatcagcgatccgcccatcagtgtcacgtcggcggattggatggccacgtcggtgccggtgccgatggcgaaaccgacgtcggctcgggcgagggcgggcgcgtcgttgatgccgtcgccgaccatcgccaccgtatagccttgcgattggagttttgcgatttcgtcggccttgcgttccggccgcacgccggcgatcacatgacgttcgtcgataccgacctggcttgcgatggcgcgtgcggtggtcggattgtctcccgtgagcatgacggcttcgacgccacgtttgcggagcagttcgatggcttggcgcgagtcggctttcggcacgtcggcgacggcgacgatgccggcgagatggccgtcgatggccgctaggatcggcgttttgccttgctgcgacaggagttccatgtcggcgatgatggcgtcgaggttcgtatcgtggatggtctcggaggcaatttcggaggtatcggacgtaatgtcgggcatgtcgacgtcaaggtcgtcgatcaggtcggtgttgccgacggcgacggtgtgcggcagaccgcggaaggtgacgcgcgcggtgacgccacggccggcaatcgcctgaaaatcggtggtttgcgcgagttccgcaacgtccgcgacgtcggctttttccgcagctgcggcaacgatcgcagcagcgagcggatgctcggaatcacgttcggcggcggcgacaatcgtcagcaaatcatcgggacgccgatgccacacgcccaacggcagcacatcggtaagggtgggtttgccggcggtgatcgtgccggtcttatccaatacgacggcattgactttgccgcatgtttccaacgcttcggcggaacggaccagcacccccatgcgagccgcgcggccagtcgagaccgtcaccgacaacggagtcgccagtccgagcgcgcacgggcaggcgatcagcagcaccgataccgcggcgaccagcgcgtgcgtgacacgcggttcggggccgaacgcgaaccacagcgcgcacgaccatacggcgatgagtaccacggccggcacgaaaacgccggagatacggtccgccaatcgttgcacgggggctttcgagctttgtgcggcggccaccatgccgatgatctgcgcgagcacggtgtccttgccgactttcgtggcgcggtaccgcagcgagccaccaccgttgatggtgacgcccgtcacttcgctgccctcggttttggcgaccggcatggcttcgccggtgatcatcgattcgtccacggtggagctgccggatatgacgatgccgtcgaccggcagctgctcgccggggcggatggcgatgatgtcgccgacgcgcacgtcatcgatggcgatgctggtttccttgccgtctcgcaccacgcgggcggttttcggttgcagacccgccaatgcgcgcatggcttcaccggtgcctttgcgggcgcgcgcttcgagcagctggccgacaagcataagcgtgacgaccacaccgaccgcttcgaaatacggttcgcgcgcgttctcgggcaggatgcccggcgcgaaggtgaccacgcaggagtaggcgaatgcggccagcgcgccgaggctgacgagcgcgttcatctccggcgagcggtgggcgatcgcggcgaaaccgctgcggaaaatcggcaatgccgcatagccgacgattggcagcatcagcaggaactgcagccagttcggcatcggatacagcatgagcatggtggagccgaataccggaatcgtgcagacggccgccacgataagacgggtgatgagggcgcgaattcccgattccgatccgcgcgatttgcccgaatcacccgaaccggacgtttggacggcgcctttttgcgcgcattgcacgcctgtttccgcggaaccggatgcgtgggcaccgtcagcagtcgcgcgaatgtccgaatcgccggaatcggacatactggcgccgacggaaccaaccgcggaaccggcggcggcaccgacacttgcatgctttcccggcagtatgcgcaacgtgccgtgcagcatgttcataccgcatgcgaagggatactcgcccggctggtcgggatgaagcgtcagcgtggtcgtgcggaaggcgggcaacgcaagatcgaccccgaaatcggagaacacgacatgcgacgagcattcgccgtcttccttgcgatcgaagatcagccgtagcggcacgccggcttcggcttcgatgacggccgggctgtacccgcctttgacttcgacgaccgcttcctgcacgccgtcgcgcaacggcgcacgatacgctttgcgcggtgcgaagaagaaccacagcacgcccgccgtgacgagcagcgccataataagcgcgattgcgatgtgcatattccagccgccttccgtccgtgattggccttcgatttcggcaaacaccatcacaatatacccctatagggtatattggcaagagggacgagcaaccttcagccgtagataaaattttcagcgcagcgaggaggacgatatgaacgtcacacaacacgggtacgcaagcgaccagaagaggatcatcgcacgattgaatcgcatcgaagggcaggtgcgaggcattcggcagatgacggaaaacggcgaatactgcatcgacattctgacgcagatttccgcagcggacagcgcgctgaagtcggtggcgctactgctgctcgacgaccatctgcaccattgcgtcgccaaagccgcggcggagggcggtaccgttgccgacgaaaagctggcggaagtcagcgccgccatcgcacgccttgccaagtaatcggaacagatccgccataaaaaactgccgacggaagacacatgcacccgtcggcagtttgaaaaaagaattacggttacaggtcgaggaagtggtcgaggccgacagtcagacccgggtaggttccggtggagaccttgcgcacggccagcagcacgcccggcatgaaggagatgcggtcgaagctgtcggcgcggatggtcagctgttcgccggagttgccgaacagcacctcctcgtgggcgttgaggccgcgaagacgcacggcgtgcacgtggatgccgtccaccacctggccgcgggagccgccgtcggtttcggtggcgtccggaaccgggccgagaccggccgccttgcgcgcttcggcgatgccctgcgcagtgtggaaagcggtgccggacggagcgtccaccttggtcgggtggtgcagttcgatgacttccgcggattcgaaatacggcgccgcgacctttgcgaaatggtcggcgagcaccgcggaaatggcgaagttcggcgcgatgaacacgctctggccctcacgcggagctgctgcgagcgcggcacgcacctggtcgagcttctcttcggtccagccggtggtgccgaccaccacgtcgacgccctgcttgacgagggcgagcacattgcccagcgacacgctcggcacggtgaactccaccacgacgtcggtgttttcgggggtgatggcggccaggtcgtcgcctgcgtcgagcgcgagcgcgagttcggtgtcggcggcggcattgacggcgtcgaccacatgcgagcccatacggcccttggcgccgactacggaaaccttgatcattgcagctccttgatgttttcgcggacgcgcatgttgcgcatgtcgtacgtttgccgtgcgcatgtgttcgaaatcgcgtgtccgcgtccataacgtgttccacttatgaatctaaagagacgcttcgacgcggaggcaggcggctatgacgcttgacgatcgaacgtcggtcagccgcggcggcgcaccagcacccagccgaacagcgcgaacggaatcgaacagcccacgaacacggcgggcaggctcaatcccgcgcttggattgaaatggtcgagcacgatgccggtgatcatggagccgaacgacgcgcccatcgtgccggcggtgctcacccaggacaggccttcggtgagcgattcctcgggcacggtctccttgacgacgaggttgccggaggcgaacaccggcgaaatggtcagaccggtgaggatctccaccagtcccatcacgatcaggttgccctggcacaggtggatcaccacaaagccgacggtcatcaacgcgaggaacatgatcatgtgacgccaacgggagcctttgagctcgcgcgagccgaagaccagcgcgcccatgcaggagccgacggccagcatggccagctgcacgcccagcacggagtcgaggtgcagcgatttcatgacggcggtcatggacgtgtcaaacgcggtgaacgccatgttgaacacgatgaacacggcgagaagcggcagcacacccgcataggtgagcacattgcgcttgttgcggtcgcgatcgcccgtcttgagccgatccaaatcgaaacggtccgcggaaaccgcggcaccagcggcaccgccggccgccaatcgcacgtcagcatcgtccgtatcggccgcgacgaccgtgattccgcgcaataccggcggttgagtgtcacgcaatgcgaagaacacggcaccgccgaacgcgcaggcgagggtcggcacgaacagctgtgatacgggatgcacggacgcggccaggaaagccgccagaatcggcccgaagatgaacacgatctcgtcgatggcggattcgagcgcatacgcggtgttgagcaggtcctccttgtcggcgcggtcgagcacgtacgcccaacgggtgcgcacaagcgcgccgaacgagaactgcgtcatgcccatgaccacggcaagcacgaacagcagcggaatcggcacgcgcatcagcgcggcgaacgcgaagcccagcatgacgatgatctgcaccgtcaggatcaccggaccgaccttgcgctggccgaaccggtcgaacaggcgcgcgtacagcggcgtgaccgcggcggtggcgagcacgtacgcggcgctcatcacgccggcgatcgtccaattgtcgtacatgtggttgagcgcgagcacgataccgaggcccatcatggacatcggcagtcgcgcgatggctccggacacgcagaacgccttcgtgccgggaatgcggaaaagctgcgcgtatggcgattgcgttttctgcgattcgtgcggttcgtgcgattgcgattgcggtttcgcgcccgtcacgccgtcacctttccccggtagatgaacatgtcgtcgaacagtggcggcacttcgccgtcggcactgccgccgagccgggcgaccgtctcgcttgccgtgcggtgcgcgatgcagtccaaccccttgtggtcgtagaagctcacgtcgcagtcggaatcggtgtgcaggtagaacgcgggcacgtcccatgcggcaaaatgctcctgcatgcgtctccaaagctgcccgcccacaccgtggccgcgcacgtcggggttgacgatgaacagttccagctcgcccatggtggtttcgttggcgcgcccttcgcgttccagatcgagttccaccgagaagccggatttcagcgccgccatatgcttggcggcctccggatcggcgtcgatgcggcgttccaaggccttcatttcctcgccgacttcgatttcgtcgagctgcggcgcctcgccggcgacgcggatgaacgtgacgcccgcgagtgtgccgtcggcggcgaacgcgccgttggcgaacgtggtcggcagcaggtagtgcagcacgaaatatcgggagatcagccgcgacatgtccgcgccgaccttgtccacatcctgcggccaggtacggtcgaacaggtcgaccaccgcgtccagatcgccccagacgatgggacggaagacgattgccgatgcgttgtttgttccggtacccatgccggcgttcgggattgcggttgcgctgttcgcagccatatcaaacactccttaactgtcgttgcgtccggcatgtgcgcccgcccacacatgctgcacgagggtagcggcgttcctccacaacgctgcctgcatagcggtttctcccgcaggcaggccggaaagcgccgctcccccgctttcttcggtcaaggagccattgcgcaccggcactagtcgttgtcggattgctgcggaattccgtagctcaactcggcaaggatctcttcttctgttttgtcgagggcgtcaagctcccgatcggcctcgtgaggctcactcacatagtagagacaggcgtcgattgcatccaacggaaccccttccatcgccgcgagcagcaggcggtacaggtcgagctgtgcgagtttgtccttgatttcgtccggtttgcgtggttttacgccggttttccaatcgaccacggtgtagcgtttcgtctcgtccgtttcgtcgagaccgccgaagaacaccgcgtcgagtttgccgttgacgatggtgccgagctggggcatgtcgacgacgagctggcgttccgcccatgctggacgtcgttttgcccacggcgaggcgacgagacgacgctgccaagcggccagtttccgttcgtctcgcaattgggcgtcctgcgatggtgcgttctgcgattgcacgccgccgttgtccgcgtcgacttgcgtatcacctatcaatgcgatcagttccgcacgcgactgcgcggccataccggcagcaccttccgtaccaccgatgccgtcgacgtccgcatccgccatgatgaaacgctcagcccatgcgtggaaccgcgtgccgagctgtgccgccggcgaggcgacgtgcggaatcggacggaccagaccacgccagtaggcgcgggagtcacgctcgcccatggagccggcgcgcgcttgcagcgaggtgacgttttggcggccggcagcaaggatacgttcgcctttggcacgcacggcctcgtcgaaggcgtcctgcgattcgcctgcgtcagccgcgtccggttccggcatgagatgttcgtcggcgacgagcagtttggcgagacgcagcagtgagtttccggtttccggcgatggcgtggcggattcatcggcaacgtcgccctgcgttcccgtggattcagcgatattcggttcgtcggattcgacggcacgtacctgttcggccgcggcacgcagcttgtcggcgacatcggcgctcagatcgcacggccaaggcaaagtatggtcgtccgagaccggttcgagcggcgtgttccacgcatcgcccaccacggcattctcgaaatcgcgggcgtgttcgcctacgaaatagccgtcgggcaggtcaagtcccagcgtgtgcggggagccgtccacatcgtcggacaggttgtccggttcgcgtaccgcggtgacgattccgttcatcgaatcgcgcgtctccagccagaaattcgacggcgcggcgcttttctttccctccgccaggcgggagtcgcggctcgtctcgttgcatccgctgtatacgagcagcgcctcgtagcgggcgcgcgtcaacgccacgtaggcgagacggcgttcgtcggcgtgcagtcggcggccgtattcctcctgttgcgtcaggtacaggcttgccggatccattccttccatatcgtcgacggccatggttcgcaaggtgccgaacacctcgtcgtcgatcacttccgcatcgtccaatccgtcgagcgattccacgggattgcccccgatgggcgcgtcgtgcgggaatcgtggcaggatatccgcgtcggcgcgcaccggaaccggcaccgcggacgggtcttccagccaagtgtgggctttttcgaagtattccggcggctcccatacgccgtcgcgccgaccgcccggatggtcttcgtccgttttgacgctcaggtggtcgccttgactggacgggaaggtgccgtcgcgcatgccgaccacggccacggcgtcccattccaggcctttcgactggtgcacggtcatgagcaccacatcgacgggggtatctggtgcggtggcgttgtcatcggacgcgtcacgcagcgaatccacccacgagatgaacgcgcgcaggcttggcgtgccctgcgcggcgatttcctgcaagtaggtgtccaccagagacagcatcgcgtcgagtgacgaagcggcatgcgatgcggcacgattgccggcatccggatgccgcatccgttcggcgagcagcaggtcgatgtccagtccgagcgcggtgatggccgtgcgtaccacttccggcaacggatggccggccgtgcgctgcacctgttggatgacgcgaccggcgtggatgacgctcgcggctcccgcacggctcaatacgccgtcgacgaggtgccgcagatcgccgcgcagcagcacgtcgatcaggaagacggcgttgggcacttggtcgcggtaggcgcgcacggtggcgcggatgtcggcgtcggacggattcgcatccgcctccacaatgccggccgacacgagcgcgcggtagcgttgcgcggtgttgagccgttcggcgatgccggcgagcgcctgcagatcgtcggcggacagaccgaatcgtggcgtggcgagcagccgcatgagcgcggcgctgtcggtgtggtcgcatacgacgtgcagcagggcgaggatgtctttgatttcgggacgttccaggagtgcggcctggccgacgacgagtgtggtgaggccggcttgttccagtgcgtcctcgtaggctggcatctgcgttttggagcggaacaggagcgccacgtgcggacggttgtctttggctccgtcggcgagctcgttttcggttggcgtgtgcagtgcgatcgcttgtttggcgaagcgtacgatggcgtcgatttcctggccgaatgtggcgtagccgagcacgccgagcgtaccttcgggggcattgtcgatgttggcgagcggggacacgtccacttcgcgcataagcgagctgccgcgacgtctggcgggcaggcgcaatggtttcgtcagattgttggccgcttcgagcaccatgcgcgagttacgtcgggtgacggtcagcgtgtagggcttgccggtggcgtcgtggccgaagtcgtgttgcagcatgcggaatgcgcctgggctggctcctcgccatgcgtagatcgattggaaggggtcgccgacggcgttcaccgcgctgcgatgggtggaatcggcgtggaacagtgcggtcaagagggccgcctgcgtggtggaggtgtcttggtattcgtcgagcagcacgtgcgtgtagcgtttgcggtaggtggctccgatggaggggaatcgggtgacgagttggaatgcggcgatggtgaagtcgctgaattcggccatgttgagggcgcgtttttcggcgtggtagtcggccacgaggtcgagtagcaggtcgcgtttgcgggccgtgccggccaattgcgcggtcttgtggacgcagagttggtggcattgggcgcggtattcgcgcatgcgggtttcgaaggcggtgtcggattcctttttcttctgtttcggagccttgcccactttcggctcgtcatcgggaacgtcctcgtcttcaagcgctttggccacttgcgccacgaacgccttatcccatgcgcgcacgcgttccacggcttcgtcgaagctggtgcagtcgctgccgatcatggctcctgcgatggcgttggatagggtgaacacgttgccggcgatggtggagaatttgccgagttcgtcgccgccttggtcgaaggccatgagctggcccatgtgcttgtcgagcacggtgtggatgagctgcagcgctccggcttcgctcaatggctgcgtgttttggtcgaagccgacgagcaggccgtattggcgcacgatggtttggaagaacgcgtcataggtggagacttccggtttgaggaaggcgacgcgtgtaccgcgtccggcttggttgcgtgtcacggcagcggagacgcgcgaaagcagttcggaggcggctttgcgtgtgaaggtcaggcccagaatcttctcgggactgatgccctggtcgatgagggtgatgatgcggcgggtcatggtgtaggttttgccggagccggcgcccgccaccacgaccacgtcctcgtatgagggggcttggatgacggcggcctgttccggactgtcggtgaatttcggcgtgacggccggcacagtgcccatcgcatcgccctttgctgtggccccgttcgttgacatgcttccgttcataccgttgctcccgttcatgccacagtcctttcgaatacggtgttctgctcgccttggcaggccgggcagaccccactgccgtacgttctgcagtatccgacgtgttccacggtcggacgcgcggtgatgcgggtggcccggctcgccgcggccgcatagaagacgcgggagatcatggtcagcgaccataccgtcatcttcgaccgcgattccagaagttgcttccaatgttcttcgctgacctgcgccggccgttcgacgtcgtcgaggccgctggtgaagacgctggccattttgggcacgtatttgcggggtatgaaatcgcccgcgttgatgcttccgccggcgaacagcgcctgctggtggtacgcttcgtcgccttgccctttgcgtggcgcgggtgccgcgtattccatgacgtggaacagggcgctttgggtgatgtccggcatggctgcgatcgcctgcgcgccgcgttttccgccgtgttccgggaatgcgaggcccagctggtagcagacgagctgcaggtcgctgaacagggagcgtccgttcggcactttgccggttttgtagtcgatcagccgtacctgttcgcggccgtcggcggtacggcggtgttcaagacggtcgattctgcccgacaggcgtacggtgagccggtcgctcatgccggtttccggccagccgtcgacgagcgcgcccatgatggcgatgagttcgtcgcgggagatcggagcgttgccgtcgatggcgttgtaggcgtcgaggatgtcgtcgaagtcgaatcgcgcggcgaactgccgttccgcttcggcatggtccaatgttcccacggtgatggtttcggtgttgttcgacgggtatcccgtacggttcgacttgacgaaatatgtggcgatgttgcgcaatgcgaccgatgctttcgcgtccttgccgagcgccttgtaccgttcctcggggtcgtcgatggcgttgaggtcgccacgtagggtcttgtatcggctgatcatccattgggcgatttcgtcgatgttgtcctcgtcgcttaccgcggtgtggttttggggcaggtcgaggccggcttcggtggcctgttgcgcgacggcgtggatgagcgagccgaagctggtggccgcgctgcccatgcgtgggccggcgaaacggttctccagcatccagcacaccgggcacgcccacaaactgtccacggcggatggagaaagggtgaccacgtcggattggccgtccgttttttcgatggattccggttgttcgataagcttcgccttgtcggcatgctccgtttttccgtcagattccatcttgccgtcgattcccgtcatatcgtcggctcccgcatgttccgtaaggaacgcccaattgtcgggattcgcggcggcgatgccatgcgatgccaacaacgccaaggcttgcgcggcatcgcgcgcttggggggaatcggccggcgcatgggccagcacgcttcgcgcggcggcgaccaggccacgcgggtcggcctccagtcccgcgtattcgccggcctcgccgaccgccgtgtacacgcgtgtttccgcatcggcatcccggtcgcggtcgaaccattccggcaggtagccgtagaggaagtcggacggcacatggtcttcgttgaggaccgcgcttaccgtcacgcgctcatcggcgcgggtgagcgccacaaggaggcttttctgttcggaggcgagcaccgcggcgagctgcgcgttttcgcggcctgcggaagtgacgatgtcgtcggacagtcgtccatgcagcatgatgtcggcgagctcctccccgccgaacagggtgttgcgcggcgcgaggttcggccattggccttgttggaacgcaggcatgaatactagtttccaatgttttccggcagctccggcgggcgtggcgagcgtcacggcctgatcgatcggcgcggtgtgcgccagggagtcggcttcgatggcgagcgcgcggacctgttcgatgaacgcgtcgatggtgtgcgctgccgtcacgccgttcgattcgccgccggacgcgtagctgaacaggcgcatcgcggtgtcgagccggtcgttggccgcgcggccttcggcgttgttgcgcaacgccgttttctgccagatttcggctttgccgaacgcctgccatgcacagtcgagcatgtattgcggttcgtgggatgtcaggcgtgcctccgaccgcagggtatcgtcaagcgttttccacaggcgtgcgaaggcttgcgcttgggggtctttgcggcccagtacggaggcgatcgcgtcgagcacgcggtcagtgtcgccttccaatagcaggatgtacagcgcgttcatgccgaaggatggttcgtccgcgtcctcagcggcacgctctcccgtcatcagccggtcgtcggtgtcgattgccggcaggcccatgtcggcagcgttttccgtgtccgacgccgatgccgccacgcgtgcggtgtggaaggtttcgacgtaatcgttccaatcgtcgatcagctgtggcagcagcgcgcgtccggacgtgtcggacgtggtcggatcggctgtatcgtcatgcaaaaccgtggccagcgagccgagcgcgttcatcgccgattcgaccacgcacagccgagccggacgttcgccgggggtggtgatcagcggcgagttcatgattgatgcgacgcgtgagcgcacgtatgcgccggccgtgtcgaggttcatggacgaggtggcgatgccttgccgtttcagttcggccagttcgatcatggagaacaggccctgcacgaacggttcgtccttgagggggtgggtcacgctcgaatagcgtacgggcacgccgtcggcgcgtagccgttcgccgaacgtgcgcacggtggcgttgtcgtgggcgatcacggccatgtcgttccagtcgcggccgtgttcgagatgttcggttttgattttccacaccacgtcgtcgagttcttcgacggtggaacggtacatcgcggcttcaagactgccgtcgtgcgtctccggtatggcgatggccggcattttgccggggcggttcgccagcgcgtcgtcggtcgattccgtgctggcgatggtcaggctcacgcggctcgccaccgcggccaggtccgtgccttcggccatatgggacggttccagccgtaccagtcgcgcgcccaatcgcgattgcgccatgttgaacaaatattcagggtacgatccgcggaacgtctgcaccgcctcgtcggggttgccgacgagcagcagtcgcacgccacggttgcgcaatgcggtgagaaagtcgaagccggcgagtgtggcgtcctggaaatcgtcgacgatgacgagtttcggcaggtcggacgtttcggcttcgttcacggcggccgcggcgtcgatcatgagctgcgaggcgtcgagacggtattggtccggatatgcctcgttgatggcctggttgtattcggcgcgcagcgcgaaggcgagccgccattgcacgcgcagtcgttcgcgtcgttcgtcaagcgtgccgtgctcgtcggcagcgcgggaaatcagcgcgtcttcgagttccggtttcgcgccgatctcgttcatgcgggcaagcatgtcgcgcagctggttggcgaaggcgtcggtggcgtcgtccaccaccatgcccgaccagtcggcgaccacgaagtaggtgcgcaatagtgcgcaggtggagcattcgtcgccgtgctcggcatgttcggcatgcttggcgagcacgcggcggatgaccacatcctgttcggccccgttgagcagtttcggcaggggttgtccggcatgcgatcgcacggcggtcatgatgcggaacgcgacggctggcagggtggtgacggggcgtgcctgcgagatcgcggacagttcgcggatcacggtgtcgccgagccggtcggccacctgtctgccggagaccgtcatcacggcgtacgcgtcgccatgccgcttcatcgcagcgaccagcatgtccagcgcgaaccgggtcttgccgctgcggggtgcccccgcaaccaatgtcgcgtcatcgagatcgtccacatccatcatgtctccccagcttagccgaacggtccggctacgaatcgcatatcatcgtccgaagccgtcctgaaaacgtcatcgtggacaccgacatctttatatatggacatcgataccctctacaaagtttttcggacaccgccaccaataagattgactagcggcgcagcccgggaaggttcaacagcgaacagacggcctgcccatgacgacgagtacagtcgaagcatagacgcaacgcacggaaccgggcaggaactacaggaaagaggaagcatggaagcctcaaggagcattccccctcagattcccggctacacactgatcaaacggctgggctccggttccgaagccgacgtgtacctgtaccagcagctttccccggcccgtcaggtggccatcaaaatcagcaagaacacgctcgacccacgtgccgcggtccgcttccgttccgaagcgaatttcatggggcagatctccacacacccctacattctttccgtctatgagaacggcgtgaccgtcaacgggcgcggctacaccgtgttcgaatacgctccgggcggcaattacaagacgttcctcgagcatggccgtctcaccgccgaccagatgctcaccgtcggcatcgatctggcgagcgcgctgttcaccgcgcatcgcaaaggcatcatccatcgagacatcaagcccagcaatattctcatcaacgcgcacaatatgcccatgctcgccgatttcggcatcgccgggaccgtctatgggcgtccgggtgtcggcttcaccatcgcgtgggccgcgccggaggtgcttgcccaaggcggtggcggcaatgaatcgtccgatatctattcgcttggcgccacgctgttcgccatgctgatcggccaatcgccgtacgagtatttctacgccgatgtgctgggcgattcccaacggcaggtgcgggccgaacggctcaagtccgtcattctcaacaatccgctgcccaagctcaaccgtcccgacgtgccggccgaagtggaacgggtgttgcgtaaggccttgagccgtacgcccgaggatcgttactattccgcgttggagttcgcgcgcgacatgcagcgcgtgcagcaggccgtgtatggccgtgccgtgcagaccaccgtcgagggtgtgccggattatccgcagaacatgtacgcgcagacttccacattcgaccagtccgccccggttgcgaaacagcatgcccggtgggtgaagccgttggccgtcacggttgctgcggcggccgccgtggtcgtgatggcgttggcgttcgtcaccgtcgtcatgccgaatatggatgcggcttccgacaacagcaaggtgcaggtgcagaaccatggcgcccagaaccatgccgaggacgatcccgattcggcgatcacgtcgggcagtgtgccgagcgtgcaggatcttacgggcgaatacaccgccgacggcaaagtgcggttcacgtgggtcaatccttcgccgaaggatggcgattcgtacgcgtggtcgctggtcggcgattcaggaaccgacccgaacgcgcagggcaccaccacggagtcgacgagtatcgaaatcaatccggccgacggcgcgcagacgtgcgtgcaggtgagtctggttcgcgcggaccggcagatgtccgagaatcccatgatcgcgtgcgcggccaagccgtgagtttgcggccggatgcgggtgacatgaaccgatacgaaccaatacagcccggcatgcatgcgggcaaacaggtaggcgcatgcggttggatgcgcggtcaagcaaagtttgggcacaatcagggaagagccagtcgatgagcaagcataggaacgccgagaaccagtcggcgcaatcgtacgaacggcagttgcgattcgggtcgatgctgcgcaagctgctgccttccggcagtcgccggtggatcacgccgatcgtcatgctgctgctgttgctgggcatcgtcgccggggccgtcatcgtcagttcggtgacgcaacgtcacgtgcagctcgacgatggcaccgtgtgggtcacttcgctcaaggaccgcaaggccgcccgtttcaacgtgcgcaaccgggacgccgatgcgggcgtcgcctccactgcggcccggttcgacgtggcccagcatgatggctccaccgtgatctccgaaggtacgaaggccagcaacatcgaggcctccaccgtcagcgaaagcggcaacaccaccatcaaatcggatatgcggaccgtcgtcggaggcaacaccgcagcgttcatcaacgtcaagacgggcaatgtgtgggtcgggtcagcagatgatgtgaaatccatgaatccgaccaccgattcgccgaagatgaagctggggtcgggtggccgtatcgcggtgacgcatgacggtgtcgtctacggctaccgcacgtccgacggcgcggtgctcagtgtcgacggacctcagggaacgcccggcaaggatgcgacgatcaagggcgccacgaatgtcgaatcgttcaccgtggtcggcaagacgccggtcgtagccggtgccggcaaggtgttctggccgaagggcagcgcggatatcggcctgcagggtcaggcgacgttgcaggcgccgtccacggatggcaggcagactggctgggtggcggtttccacgccgcggggcatcgccatggtcgatttgggcagcaaaaaggtcacgcagctgccgaatgccggcaagggcgatgccgcgcagccggcgtccaccaatggctgcgtgttcgccgcgtgggcgcagaaggccaacaattacatcagggtgtgcgcggcgaacgacaaggacgcacagttttcctcgttggaagatgtcaatcccacctcgcagctcgtgttccgcaccaaccatcgtctggtggtgctcaacgacgtggtcaacggcaatgtgtggaatccgcaggagtccaccaaggtcatcaaaatccagtggaacaaggtggagaccaagcagtcgaagcaacagcagcagaacaacgacagcgccaacaaccagcacaatttcagcaagaactgttcggcgcagtcggggcagatcaaggccgtggacgattcgttcggcgcgcgcgtgggatcgcagcagattctcgacgtgttgcgcaacgacgagcagaccgactgttccgtgctgcgcatcacgtcggtgagcgctccggatggcgcgaacatcaccgtctcccccgtctatgacggccggtatctgcagctcgacgcctccggtgccgccgcgggcaacgtgtccttcagctatgagatttccgacgggcgcgggcagacgtccagcgccaccgtgtcgctcacgctggccggcggcgacgaccatgcgccgctgcagagcgacactccgccggaaatcgacgtggagcagggtgcttcgtacaccgcgaacgcgttgggcagcttctccgaccccgacggcgatccgctgaccttggtgtcggcatcgccgcagaacaccgatcaggtgacggtgtccacgcgagccgacggacaattggtcttcaacgccggttcgatgtcgtccggcagggcgggcatcgaggtcacggtgtccgacggccagcagaccggcatcggcatgatctacttctccgtgaagccggcgaacacgctgggcgcggtcatcgaccccgtggtcaaacagaccacgcccgacacccgcaccaccatcgcgctcaaaccgtacgtgcacggcacgtccgtcgaaccggccgaattgaccgcggtggagacgccgtccggcgcggccaccaccatgaacgccaccgacatgtcgatcacgttcaccgcctccaatcccggcacctactatgtgccgtacaccatcacgcagggttccattccgtcgaccggtctggctcgtgtggaggtgcaggcggtggccggagacgccgccaagccaatcgcggcgaacgacgtggcgctgctaggtgcggacaataccgcgatcgtggagccgcttgccaacgacgtcgacccgatgggcggcgtgctgtcggtgaccagcgtcaccgcggacgcgcaaagcggcatcaaaaccggtgtggtgagcaacaagcgcgtctatatcaccgcgcgtcaggtgcctaccgagccggtgcggatctcctacaccgtggccaacgcggccggatcgtcgaccggcgtcatcgtcctgcagccgccggcgctgaccacgtcgaattccgtgccgaaggccgagaacatcaccacacaggtgcgcaccgaaggcatcgtgtccgtggacgtgctcgaccatgtcacgtattccgacggcaccacggtgagcctgcagaacgacttgcagtatgacaagaacacgttcaagggtctggtgttcgtgtccggcgacaccgtgcgctatcaggccaccagacaaaccggctccttccccgtcacctacacggtgaaggacaatctcggcaacgcggcctcggccaccatcaccatcaacgtgcatcagaaggacgcgtccaacaaggcggctccgacaccgtccgacgtcgaggcgcaggtggcggccggtcagaaggtgcagattccgatcacgctcaccggcatcgacgctgacggcgatgacgtgcagctgctcggcttgggcaacaaagcgccggaactgggccgtatcagcgaggtgggcgccacgtatctggtgtatgaggcgtatgccgattcgtccggaacggacaccttctcctacgccgtggaggattggaccggtcagagggccaccgcgcaggtgcgtgtgggcgtgttcaaatccggagccgattcgggtgtgtacgcgcgcgacgacgagatcacgctgcgtccgaacaccgcggccaccgtgccggtggcgcagaacgacatttccggggacaatactgatctgaccgtgtccaaggacgtggaatcgcaaggcatcggcggcattcaggtcgtcgacaacatgctgtcgttcaccacgccgaagcaggcgggcacgtattacgtggtctacaccgtcaaggacaaggctggcctgtccgattcggcgacgttgacggtgaatgtcgacgagaacgccgccatcgacccgccgaccgcgtacgattaccgtgttccggccgccgccacgatcgacaagaaatccgtggacgtggacgtttcgcagtggatcgccaatccgtccggcaccgccgacgagcttcaggtgggcgtggatccttccgcgaccgaccatgcgcatgtcaagggcggcaaggattccaccatcatcaccgttgatctgaccgatgaggcgcgcgcggtgccgtacaccgtcacgaacacgacgtacggcatcacgtccaccgcgttcatccaagtgcccgcatatggcgtgtttccgccggttctgcgtccgaaggcgccggcgttgaaggtcaatgcgcgtgagaccatcaccatcaacatcgccgactacgtgcgtgtgggcgcgggcaagaccgcgtatgtggacggcgccgattcggtgagcgccacgaaggccgcggacggcgacctgtacgtcaacgaccagacgttgaggttcaccgcgccgaaggattacgcgggtcccgcgtccatcaccttcaccgcggtggacggcaagcgagacaagaacgacaaggtgaagatcgtcaattcggcggtgctcacgcttccgatcacggtgatcggacgtgaggttccgccgccgacgttctcatcctccaccgtcgatgtggtggccggcgagaaggccactaccatcgatctgacggcgctgacccattcggcgtcgggcctgtacgaggatgagaagcagtactcgtattccggcggcgtgaattccggcagtgtggatgccagagtgtctccctccggcacgttgaccgtgtccgcggacaagacggccacgccgggcaccacagtgagcgtgcccgtctcgatcaaatatgcgaagggtacggtgagcgccggtatgaccgtgcgcgtcaccgcgtccaacaggccactcgcccgtgtcaccgagaagaccgtgaaaatcaaggccggttccagcgagcaggtgaatctgctgtccgacgcgtacaatccgttccccgacactccgctgacggtgaccggatgcacgtccgatggcacgtcgaagctgacggtggattgcccatccaacggcgtggtgtccatcagggcggcttccgacatcggcgcgaacaccaacaaggtggtcgtcaccgtgcgcgacgccaccaaaacaaaagaacgtgaggtgaccggcaccatcagcgtttcggtgatggacaaacctgatgcgccgctgctttccgcggtgtccggcgacccgcaggatggcgccgtgaatctgagctggacggccggttcggccaacggcagcccgatcaccgaatacaaggtgatgtggggcggagacgcgtccggcgagcgctcgtgcgggcagaaaacctcctgtctcatcgacgggttgaagaacggcaagacctactcgttcaaggtgcaggctaggaacgaggtcggctggtccaaggattccaacgccgtcgagggcacgccagacaagctgcctgatgcgccgacggatgtgacggccagtgtgaagggcaacacggtgagcgtcacgtggaaggctccggacggcaatttctcgtcggtggacaattacgaggtgactttgtccggcaggaacgcgccgtccaagcagacgacaaattccaccggaatcgattttgttttcgataacaacgcgatttccgacggcgactcgtacacggctacggtacgcgcccacaacaaggtgaattggagccaaccgtccaaggcgtccgacgcggtcaagccgtggggcaagcccgatgcgccgaagatctccgtgacgaacgacgacaccacgggaaccgtcaccgtcgaatccgtgggcaacacccgcaacgcgggatgcaaggccgtcgagatttccggagatgtcagcgcaagcatcgacggatgttccggatcctacgatttcaagattccggatcatgatctcaacaccagggaatacaccatcaaggcggcggtggtcggcaaggagaaaacgaccagcgacgattcgaccgtgcgtttcacaccgaaatacgcggtgaaggcgcccgaatcggtcagcgtcaaggggcatgacgacgtgtgcgtagtcagttggaaggagaacggccacgccgacgggttcacggtgagcgcggacggactcggctcctaccatgccggcgcttccgaacgatcgcacgatttcccgctcaaggaatggcagtcctgttcctcgggttccgtcacgcagcatttcaatggcgcggcaagcacctccaagtccggcagggccgatccggcatacgtccgcaaggtgaaggccgccgtcaaggcgccgatgctgacgtgggacgccaatgatccgaacatcatcaaggtcagcggcggatcggtgaacatgtacggccagcccggcaaaaccgtgatcaccttcaccgcggacggcaaatcctatgacgtcgcctgggcattgggctccgacaaactgaacgtcaaggatgtgctgccgaccggagccgattacgcgtggaaggcgaaggtggtgggcaccgacaccgcgctcaacaacgaggacaatggcggcacactgctggaccatgacaggtacaaggctcccacgccgaaacccgaaccgtcggaaccttcagaaccatcaaaaccgtcggagccatcggattctgacgcgtccacggaaggcgaagcggccacgcggaatgaccggcctgtggcatcctccgtcgccctgtccaccgtcgacggcgcatccaagccttggatccgcggcctggcctactacgccagatggtgaaacggacgatcacagcaatcgcaaacacaacgaaccatccacacgagcaacacaacaagcaaggagcaacccatgagcaacgatttcgatgatgccacccagctgggttccatcggccataatccaagcgttcccagccaacccggccagcagcagccagcgttccacacgccgaatctgccggagcagccgcaagccgatgaggatccggagggcacgctgctgagcgcgcacggcaccgcccaaccggcgttgccgcaacagtccgccccggcaacgccgaaccagccgcggttccgtcagccgatgccgcagaaccttcgccaaccggccgccaatccggcagtcgcaatgcccgcgcagcagcccgtccagccaacccaacccgtccagcccagccagcctgtacagcccgtcaaacaatcccagccggtcgtcgacacgtccatgatgaccgcacccagcaaagacatcaccgaattccatgagaagttcgccaagctcgtagacaacgtctcccaggtcgtggtcggcaaggaagcacccatccgccaatgcgccacagccatggtggtcggcgggcacatcctgctcgaagacaacccgggaaccggcaaaacccagctggcccgaggcctcgccaactccatcgccatatccttcaagcgtatccagttcaccccggatctgctcccgtccgacgtggtcggcgtcaccttctacgaccagaagaagggcgaattcgaataccgcgaaggaccgattttcgcgtccatcgtgctcgcagacgagatcaaccgcgcctcgccgaagactcagtccgcgctgctcgaggtcatggaggagcagaaggtcaccgtcgacggcgtcacccatgaagtgccgcagccgttcatggtcatcgccacccagaacccgatcgaacagctcggcacctacaagctgccggaagcgcagatggaccgtttcctcatcaaaaccaccatcggctatccaagccacgacgtgagcgtcaacatcctgaaacaggtcaacgtcaccgaccgcgccgccaccgtgcatccggtgctcaccagcgaagacgtgctgcgcatgcgcaacatcagcgaaaccgtgcatctcgacgacgcgatcctcgaatacatcgtgcgactggtggaagccacccgccacaacgaacgcatccaagtcggctcctccatgcgaggcgcgctcgccttgacccgctgcgcgcgcgtatgggccgcctccgacaaccgcggctacgtagtgcccgacgacgtcaaaaacctcgccgtacccgtgctcgcgcaccgcatcaccctcaccgccgaagccaccttcgccggaaacacccccgaacagatgatcggccagatcctcgaagacgtgccggccccaaccctgggcgccaacgcctgaaacacaatccaccccggcatacgcaccacacaatccgaaaggtcaaggaatgcggcattcgcacacagtgcagcgcagacggaccatccaacgatccctacgccgcctcaaacatcgcatcaagcgactggccacctcatacgtgtcgccgcttggctgtgcggtggcggcgctcgccgtcacctcgctggtggcgttcgtcctgctggggtggcatgagctgctggccatggcggtggtgttcgcggtcatgctggccgcggcggtcatgctttcccttggcaacacctcgttccaagccaccatcgacgtgtccagcagacgcgtcacggtgtcagacacggtgaaaatcgacgtctgcgtggacaatccgggccgcacccccaccacgtcggcgcgcggcgacctgcccatcggagacaaccacgaacggttcgccattcccatgctcgccgcaggacagtcacgccagacaactgtggaattcaccgccgtcagccgcgcggtgctgcccatcggcccgctatccatccgcaaaggcgacccgttcggtctgatccgccacgaaaagaaactcgtggaccagatcaacgtattcattcatccgcagaccgtgctgctcagcaccctgaacgccggcattccacgcgatttggaaggccagccaagcggcgaaatcgtcgacgacgacctcgacttctacggcctgcgcgaatacgagcccggcgatgacgtacgcaacgtgcattggctcagctccgcgaaaaccggatcgcttatgatccgccaatacgaagccacccgccgtaccgacaccgctctgaccatcagcgtgaacccggatgattacatcgattcccaggaattcgaactggccgtatccgtccacgcctccatcggcgtgcaatgcctgcagcagaaccggccagtcaccgcgcatgccggttccacgcacgccattccgcgcaacgccacggaatttctcgatggctgcagcggcatcgaccctgacatcgacgacaatcccaacctcgcgcaaaccactctcgaacatgcccccgacgcatccttctacttcttcaccgtcggcaggctcaaaaccatcgacgacatcaaacacatggtcctcgcactcccccgctccgcaacctgcgtggtgcttcaagccgcaaccggccaaccgcgcgccatcaaacgctactccgacttcaccttggcaaccgtgggagacctcaacgacctccccatgatcatgggggtgctggcatgagcaccacattcaccaacaccggcaatttcaccggcaacctcaccggcacaggcaccaactccgccaacaccaacactggtatggcgaccggcacaggcaccggctcatgggcgaactccacccactccgtcatctggatgtcccgcagcggcaagtccccagccatgcccaacaccaaccagccacacgccgcgcaatacgcaagcctcacggtcgccgccctgctgaccatcgccgcagccagcaacctcatcgacgtatacggctccgccctgtcttggacgagcgccgcaatccccgccaccatcatcggctcgctcgtggcgcttgccggtctcgttcccgcgttgcgcctgtggtggcagatgctgttcatggcgtgtgcgcagctggtggtcggcccggtcatcttcctgaatggcaccaccatcgcccatgtcattcccacattgcgcacgttgacgcaggggtggatgcggatgctcggctcgttcaaatacctgctggccatcgacccgccgaccggcaccggcgacggctcgctgctcgccgtgtggacgatctgcctgtgggccgcgctgctggccggtatcttcgcggttgcggaggatggccggcttacgatggtcgcggtcgttcccgtcgtggcgaatcttgcgatctgcgcgctgcttggcacgtcgagcggcttctaccgtatggcgatcggcacgattatggcggtcgtgctggtggtttgggtcagcgcgcgttggaaactgttggaattgggccgttggctcagttccgtagtcatcgtgctgctggcttcggctgtggcgatcggcggatgcttggtggtcgggcaaaaccgcaccattctgcgcgaccattatgatccgccgctgagcccgtacgattacaccagcccgttgagcggcatgcgttcgtatatcaagaaccataaggacgatgtgctgctgaccgtcgacgatctgccggccggttccacggtgcgtttggcggttatggaccgtttcgacggcaatgtgtggaacctgtccgattccaccatggcttcggattcctccaactaccatcgtgtgggcgattccatcacaaacaacgccaccggcaagcggttcaccgcgaaattcacggtcgatgacggtttgagcgactattggctgccgatggccggcgcggcttccagcgtgaagttcgccacatcgtcggacgccgattcgttctactacaacaccgacaccatgtcggcgatctacccttcgcgcacctctccgggattgtcctatacggaaaccggcgtcattccacggacgccgacggataaggagatcgccaaggcgaatgcttcctccatcagccagcccaaggcggaggatgtgcccgattgcgtggataagctggccaccgcgattgcgggcggccagtccaagggcggcgaggccgcgcagtctcttgccgacaagctcagggaatccggctggttctcccatggtttgaatggcgattacccatccagagccggtcacggcaactatcgtatcgaccagctgctcgccggcagtgcgatggttggagacagcgagcaatacgcttccgcgatggcgcttatggcccgcagtctcggcttgccgagccgcgtggtgctgggcttcctgccgaagaacgacgagggcgagatcagtgacagccgcaccgagaagcatggcaaaaccaccaccacgaaattcaccggcaacgatgtgaccgcttgggtggagatcaagctggacggttacggatgggtggcgttctacccgacaccgaaggaaacgaaggttcccgacgagaaccagaatctcactccgcccaatccgcagaccttggtgcgtcagcctccggtgccgcttaccgatccgctgcgtgacgacaaccaagccaagggcaaaacgtcgcttggcggcagcatggccgacgagacgccgacgagcctgttctggcagcgtttcggcagaatcgtcagaaaagtcgccatctacggcagccctctgtggacggtgctcatcgtctgcggcctgctgctcgccatcaaggcgatcgccctggctcgggctcgcaggcatggcagcgcatcgcaacgcgtcgctgccggatggcaggcggtcgcggcgcttgcccggcaaagcggccttgacgtccaaggcaccagaaacgagcaggcgcaggccatcgccgaacagatgggcttcgaagccgatacactgctcgcgctgggcagggaggctgattacgcggccttctccggaggcgatgtcacgcaggagcatgcggaacgctactggcatgacatcgccgaagaacgaaagttcatgctcggctcgctgccgacgttccgcaggtggcgggcgaaactatcgcttgcggacgtgttccacttccggaaaatccgtttgcggaaaatcggtgtgaaagggcgggactcatgaacgtcaaacatattgaggtcggtctgaacagcaatatcggcttgcgtaggaaagacaaccaggacagcgcctgcgcaggcaacggcgtgtatgtggtgtgcgacggcatgggtggcggcaagggcggcaagcaggccagttccgatgttgcggaacggttcgcgcgtttggccgaactgccgacgcgcgatcttgacgcgattgacgaaacgctgatccttgcccagcaggaggtgctccgtctgggtgagcagctcggcggcgttgcgggcactaccatcagcggcgtgctgctgccgacgcgtgtcggcgatgacgcgatatgttccgacgaacggtgttacatcgtcaatgtgggcgattcccgcacgtaccatatgcgcgccgacggcaatggcgcgtggctggcggattcgctgacgtgcatcacccgcgaccattcggaacggcagaacgccatcgattcggggcagatgctgcccgatgaggcgagccgttgcattccgcgcaacatcatcacgcaatgtgtcggcgcgcctgccggcatccagcctgactggtacgccgcgcgtgcggacggacggttcatcatctgttccgatgggctgcatgcacagatcggccgtgagcagcttgccgagatcgcggcggcgtacgccgacccgcagatggccgcggacatgctggtacatgccgcgctgaacgccggtggccgcgacaacatcaccgtcatcgtggtggacatgcgttccgatatgccgtgcgacgaggattggaacgtcagcaagatcggcgatgacgaggatatcgacgatgcgctggacggtacgttgcaaacgttacgagccattcaataagatggttacagaccacgagacaaggagatcatgatggtcgatttcgatgccgcggtggcggccgtgcaggatccgaacgccgatcccgtgttcctggcgaaaatcgcgtacgagaatccggaattcggtgcgaatgtcgttgccaatccgcgagcgtacccgggtctgaagcgttgggtcgccgaattcggcgatgagcgcgcccgccagcagctggtggcgatgggctggccggttccgcaaaatggcgtgcagccgcagccgattgccgagccgacggcccagccaatggccgaaccggttgccgaacaggtccagccggaacagcagtatcagccggcagtggcggaacagttccagcagagcagcagtatcagccggaacagccggtgaaccagcaatacggtcaggacgctgcctatgcggcgtctaacgaggcttcgaccgagtatgtcgacccatacataaatcccgccgatttgtccgaagtggccgattattcatcgagccagccgcagaacgaaccggaacagcagtatgccgaacagcagtatgccgcggcccaggaatcgccggcagacgcggggttcaccgcggaactggccatgaccaccaccgatcagatgttgatggcccgtatcgccagcgaagcgccggagcttcgtccgtgtcttgcgcgcaatccgtacatctatccggaattgcttgcctggcttggccagttgaacgattcggccatcaacgcggccattcgtctgcgccagcagtgagctaacgccgattatcagactatttgaaacataaggggttgtcgcgggaatctccgtgacaaccccttatcgtcttaccgctaaccgtccgcgccgacgctgtcaacacaaatcgtcaacgcagtccgtcagcgtaatcgtgtcttcactgacaaacgccctcactgtttgcggaattggaagaactggtcgccgatacgcaccgtgcatggcgcctccagctgcatcggcttgtgttccactttggtttcgacatcgtcttggatgatgtacgtgccgttgagcgaaccgtaatcctctatccacagcgtgccatcctggtcgaagctgatcgccgcatggttgcgtgagattgtgcgcgtcggatcctccagcttgaccgatttggcgccggcgggcacttcggccgaaggcttgcggccaaggagcacgcccatatccacgatcacctgctgtccggtctgctcgttgtccagcacgtacgtgtgcttcggctgcttcatggtgaaggcttcggaaagcacggtgccgtcccagtcgatatcgtcctcgtccgaaatggcagcgtcgcccttcgcaacggaaacatcctgcatatcgtggtcgtccgattcgttctgtgcggcgagccgttcgcgtgtttccaaggaatcggcggcattgtcgacgggttcggctgtgggttgcgccatcaccgtgacgtcatcgtcataccaccctggttcgggcggcggcgggtaaggtagaaaactcatattcccattgtaggaaggtgacgtccatgccgtctgacgatactcattctgtaatacgatgctcgcatattccatctcaaaatattatgctgtaactcgtcaaaggagacggacacgtcgatgtttccctccgtgttcacggattcgacattcaaaaaaaggaaaaaggatacggaggacttttctcatggcgaacactcctccgtatggtcaaccgcagaatgggcaaccgcagtataaccagcctccgcagccgcaggcgccaaactacagtcagccacagccgggcgggcctcaatacggacagccgcaacccatgccgtacggccagccgcagcaatacggacaaccgcaaccttatggacagcctcagccgccgatgccgcagtatggtcagccgcggccgatgccgtacggtcagcccgccatgccccagcccaccgcgtctcaaccggcggttccacagcctgcgatgccacaatatgcccaatcgcaacaatacggtcagccgcaaccgccaatgcccggcaactttccttcccagcaagccggcgccgcggccaaaaataagccgccggtcgccattaatccacaacctcgcaatcccacgacatatagatatagcgaaaggcggaaccgaccggtattggtcggttccgcctttcgctatgtcagatgattcgtctgtcgactatcgtgaggggaatctcacagggtatcgcccagatcggtctggccgccgttgtcgtccaggaagtcatccgggttgaagtcatcgcccagcttcaggtcgccgaagtcgatgttggagaagtccacatcggacaggtcggtgtcgccgaaggagctgtcggtgccttcgccgcccaaaccgaagttcgggtagatggtgtcgcggatggccttgtcgggctccaccgtggcattgcggtaacgggcgaggccggtacctgccgggatgagcttaccgatgatgacattctccttgaggcccttcaggtcatcgaccttctggttcagggcggcttcggtgagcacgcgggtggtctcctggaaggaggccgcggacagccaggaatcggtggccagcgaagccttggtgatgcccatcagctccggacggccggcggccggcttgccaccgttcttcacggcttccatgttggcggccttgaagcgtgccttgtccacgagttcgcccggcagcaggtcggtgtcgccggagtcgatcacggtgatgcgacgcagcatctggtgcacgatgacctcgatgtgcttgtcgtggatatccacgccctgggagcggtacacggtgtgcacttcctccacgatgttcacctgtgcggcgcgcgggccgaggatgcgcaggatcttcttcgggtcgacggagccttcgatgagctgggtgccggcttcgacatggtcgccgtccttgaccagcatcggcgcacgacgggtcaccgggtagacgatcggctcgacggagtcgtcgtccggcttcagggtgacctgacggccgcgctcggtgtcttccaccttgaccacgccggcgaactccgcgatcggagcctcgcccttcggggtacgggcttcgaaaagctcggtgacacgcggaagaccctgggtgatatcggaagcggaagcgacgccgccggagtggaaggaacgcagcgtcagctgggtaccaggctcaccgatggactgtgctgccacgatgccgacggcctcgccgacgtccaccagcttgttggtggccagggaccagccgtagcacttggcgcacacgccacgcttggattcgcaggtcagcacggaacgggccttgacctcttccacgccgtgggcaacgagatcgttgagcacgtccatggacagggcgtcgccggccttgtacagcacggtctcgccgtcggccgggtcgatgacgtcggccgcgagcagacgggagtacgggccaccgtcggcggccttgaccaggtgcaggttgccttcggcatcgcgttcgccgaccttcatggtcaggccgcgcttggtgccgcagtcctcctcacgcacgatcacgtcctgggagacgtccaccagacgacgggtcaggtagccagactctgcggtacgcagtgcggtatcggccagacccttacgcgcgccgtgctgggagatgaagtattccagcacggacaggcccttacggtagttggacttgaccggtcgaggaatgatctcgcccttcgggtttgccaccaagcctcgcatacctgcgatctggttgatctgcatcatgtttcctcgtgcaccggactgcacgatgatggccaggttgttcttggaatcgaagtgttcctcaaccgcctcggagacctcgctggtgcacttggtccacaggtcgaccagttcctgacgacgctcctcttcggtgagcataccgatttcgtagttctcgttgaccttgtcggcttcgccttcgtacttttcgatgtactcgtccagttccggcggctggataacgtcggagaacgcgaaggacacgccggaccacggtgcgcgggtgaagcccagatccttcagggcgtccagcgtcacggccacctgagcggtggagtaacgggtcgcgatgtcgtcgacgatcttgctcagacgcttcttcggcgcctgctcgttgacgaacgggtagtcgaccggcaaggtgccgttgaacaggatacggccgtaggaggtggcgaacaggacggagccgtcatggaaacgctcctccttgaccacgtccgggctgcccggttccggatcgacgaccttgacctcgcccggctcccagtccttcggcagcacgaagtcccgcggaaggcggatgagcaccttggcctgcatgtcgatctcgtgcttgtcgagcgccatttcggcctcttccagcgaggagaacacgcggccctggcccttggcgccgtcgatgacggtggtcaggtagtacagaccgaggatcatgtcctggctcggcatggtcacggtgtggccgtctgccggcttcaggatgttgtcggaagccatcatcagggaacgggcctcagcctgggcttcggcggacagcggcaggtggactgccatctgatcgccatcgaagtcggcgttgaatgcggcgcaggcaagcggcggcaggtggatggccttgccttccaccaggatcggctcgaatgcctggatgcccagacggtgcagcgtaggcgcacggttcaggagcaccggatgctcggagatgacctcttcgagcacgccccacacttcggagtcggcgcggtccacgaggcgcttggcgctcttcatgttctgcgcgaagccctggtccacgaggcgcttgatgacgaacggcttgaacagctcgagggccatcggcttcggcagaccgcactggtgcatgcgcagggacgggccgaccacgatcacggaacggccagagtaatccacacgcttaccgagcaggttctgacggaaacggccctgcttgcccttgagcatgtcgctcagggacttgagcggacggttcgaagcgccggtgaccggacggccacgacggccgttgtcgaacagggagtcgacggcttcctggagcatgcgcttctcgttgttgagcatgatctccggggcgccgagctcgatgaggcgcttcagacggttgttacggttgatcacacgacggtagaggtcgttgaggtcggaggtggcgaaacggccaccgtcgagctgcaccatcgggcgcaggtccggcgggatgaccgggatcacgtcgagcaccatggcctccggcttgttgccggtggtcaggaacgcgttgacgaccttcagacgcttcagggcgcgggccttgcgctggccggtgcccgtgtcgatctcttcgcgcagctgcttggaggctgcctcgaggtcgaagtcctgcagacgcttcttgatggcttcggcgcccatgcagccttcgaagtaatcgccgtagcggtcttccatctcacgccacaggtcgacgtcgccttccatgtctcccggcttcagggtcttgaagcggtcgaacacggcgctcagacgctggatctgctcgtcgtagcgggtacggatggcggccatttcacgctcggcgctgttacgcagcttggcgcgtgcggagcccttggcttcgccttcggcttcgagctcggccaaatcggcttcgaccttcttggcgcgctcctcgatttcggcgttgcggcgcttctcgaggttggcgatctcgttgtcgaactcctgctgcaggtccggcaggtcctgatgacgctgctcttcgtccaccttggtgaccatgtaggccgcgaagtagatgaccttctcgaggtccttcggcgcgatgtccagcaggtagcccagtcgggacggcacacccttgaagaaccagatgtgggtcaccggagcggcgagctcgatgtggcccatgcgctcacgacgcacacggctcttggtgacttccacgccgcagcgttcgcagacgatgcccttgaagcgcacgcgcttgtacttgccgcaggcgcattcccagtcgcgggtaggtccgaagatctgctcgccgaacaggccgtctttctccggcttcagggtacggtagttgatggtttccggcttcttgacctcgccgtagctccagttgcggatgtcgtcggcggtagccagtccgatcctcagtttgtcaaattcgttgacgtccagcactctattgtcctgtctatcgattcttaatgcttatcacgttgttcggggattggccgcgctgcacgctgtgctgcagcgcggccaatcctttcaatcactggaattcgggctcctcggcaacctggtcttccttggcggcggcgtcaggacgcgcaccgatgttgaagccgaggtcatcggaggaagtggacggatcgtcatcctcgtccttcatgtcgatggccacgccttcggcgttgagcacttcgacattcagggacagggactgcatttccttaagcagcaccttgaaggactccgggatgcctgccggcggcaggttctcgcccttcacgatggcgccgtagacgcgcacgcggccgtcgacgtcatcggacttggtggtcatcatttcgtgcagcgtgtaggcggcaccgtaggcctcgagggcccacacttccatctcgccgaagcgctggccaccgaactgagccttgccgcccagcggctgctgggtgatcatggagtacgggccggtggagcgggcgtggatcttgtcgtcgaccaggtggtgcagcttcagcatgtacatgtagcccacggagatcggcttcgggaacggttcgccggtacggccgtcgaacagggtcgccttgccgtcggggccgacgagcttgttgccgtcgcggtccggaagggtgcagctgagcaggcccttgatggtttccggacggacaccgtcgaacaccggggtggccaccggagtgcccggagcgcccttttcggcgccctgcggcacgtacttcttccaagcggcctcggcatccgggtcgagggagatgtcccagccggcgtgcgcgatccagccgaggtgcagttccagcacctggccaagattcattcgagaaggcacgcccagcgggttcagcatgatgtcgaccggagtaccgtcggcgaggaacggcatgtcctcttccggcaggatgcgggagatgacacccttgttgccgtgacggccggagagcttgtcgccctgggtgatcttacggtgctgtgcgatgtagacgcgaatcatctggttcacgccgttcggcagttcgtcgccgtcttcctcggcgtcttcgcgggtgatttccttgaccgcgatgacggtgccggtctcgccgtgaggcacgcgcagcgaggtgtcacgcacctcgcggctcttctcaccgaagatggcgcgcagcagacgctcttccggagtcagctcggtctcgcccttcggggtgaccttgccgaccagaatgtcgccggcttcgacttcggcgccgatgcggatgatgccacgctcgtcgaggttggccaccgcgtcctcgccgacgttcggcaggtcgcgggtgatctcttcggcacccagcttggtttcgcgggcgtcgatctcgtactcctcgatgtggatggagctcagggtgtcgtcctgcacgaggcgctgggagatgatcacagcatcctcgtagttgtagccattccacggcatgaaggcgatgagcaggttcttgcccagtgccatctcgcccttctgggttgccggaccatcggccagcacggtgccggcttccacgcgttcgccgtcgtggatgagcgggacctggttgtagcaggtggtctggttggagcgctggaacttggccagcttgtaagagctggtggtgccatcgtcgttcatggtacggatgatgtcggcggacacgtaggtcaccacgcccggcttctcggccaggatgacgtcgccggaatcgacggcggcgcgccattcggcgccggtgcccacgagcggacgctcggattcgatcagcggcacggcctgacgctgcatgttggtgcccatcagcgctcggtgtccctcatcgtgctccaggaacggaatcagggaggcgccgacggaaaccatctgacgcggggagacgtccatgtaatcgacggagctgaccggcacatcgaccgcttcctcttcgccgactcgggcaagggcctgcttcttgacgaagttgccgttctcgtcgagctcctggttggcctgggcgatgacgtgctcggcatcgcggtctgcggtcatgtactcgacttcgtcggtgacgtggccgttgacgaccttacggtacggggtctcgatgaaaccgaacgggttgatgcgtccgaaggttgccagagagccgatcagaccgatgttcgggccttcaggagattcgatcgggcacatacggccgaagtgggacgggtgcacgtcgcgcacttccatggaggcgcggtcgcgggacaggccaccggggcccagagcggacagacgacgcttgttggtcacgccagccagcgggttgttctggtccatgaactgggacagctgggaagtgccgaagaactccttgatggtggcgttcaccggacggatgttgatcagggactgcggggtgatggcctccggatcctgggtggtcatacgctcgcggaccacacgctccatacggctcaggccggtgcgcagctggttctggatcagctcgccgacctggcggatacgacggttgccgaagtggtcgatatcgtcgacgtccacgcgcaggtcgacgtccttgccgtcgcgcttgcccgggaacttggtatcgcccgcatgcagggtgaccaagtacttgatggtggcgatgatgtcctcgcgggacaggctgcggtcgttgacgtccttttccagaccaagcttgcggttgatcttgtaacggccgacgcgggccagatcgtaacgcttggtgttgaagtagaaggagtccagcaggttcttgccggcttccggggtcggggtgtcggccggacggatcttgcggtacaggtcggtcagggcctcgtcctgggtctgcacggtctccttggcgagagcgtccatgaccagcgggtagtccttgaaggcgtcggcgatctcatccttggtcatgccgatggccatgaggaacacgatggcggactgcttgcgcttacggtccacgcgcacgccgaggacgtcgcgcttgtcgatctcgaactcgagccatgcgccacggctcgggatgatcttcgcgccgaagacctccttatcggaggtacggtcctgggaacggtcgaagtacacgcccggggaacgcacgagctgggacacgatcactcgctcggtaccaccgatgatgaaggtgccgtgcggggtctgcagcgggaaatcgcccatgaacacggtctgggacttgatttcgccggtgtcgccgttctcgaattcggcgttcacgtacagcggcgcggagtaggtgtaatccttctccttgcattcctgcacggtgtggcgcggttcttcgaagtacggatcggagaaggtcaggctcatggtctgagcgaagttctcgatcggggagatctcctggaagacctcgtcaagaccggaggtgtggggcacggtgttggtgccgttctccagatcctcctggactcgcttctgccagcgctcgttgccgatgagccagtcaaagctgtcagtctgtacacccaacaggtagggtacatcaatgggctcgcggatggagccgaaattcacacggtccgacgccttgtgcagatcaatatcatgctggtcggcgcgtgcgatgatggtggtggtgttcgtcgtagcctcagccaatggacgttccttatcgctcgctaatcgtatcgatatgtttccccggaagcgctctcattggccaccatatgcctaatacgcgggcgcctcttccttgtcagcgtgcccgctatatgacacgcatctacgcaaagtcattagaataacataacctgtagattttattccactgtgatgccgaccggttccgacttggttttcgcatgtcctttgaccgacagttgggccgaatacacgccacggtccacgttcggcaggtccgccgcgtcggcgcattcgctgccggaacgcacgcccggccaagtgatcgtctgcttgacctcgtcgcccttggctatcagccggtaatccgtgtccacggggcatacgttcgatttccagaccacgtccttgcccgacttgatcgtcagcaccatgcccgcctgggacacgtcgatcagacagccagccttgccggaaccgttgtatttcacggaagcggtgaagtccatcgtgccgcccacaccgaagctcgatgcggccggagtaagcgacagcgcgacgttggatgcgtcgcaatcgggaacgctgcttttctgctgttgggtcggcgacggcacctccttgcgggagatcgcgtaaacatcggcatggtggatttcgcggttgacagcgacgacgccctgcgtcagcgaatacaggcagaatacgatgaagctcagcaccagcaccgtcgcgataccgaaaacgatgcggcggcggcgatacatcgcctgctgttgtttcgtacgtttcttaccggtccgcggggaggtcttgtgagccatggctcccagtctagcgtgtcatcctccgtgcggcaccgcggccgcacgcaccacgcatgccgtgtacgttacaccggcagccgcacccctcccccgggcaggatttcgatcagaccgtcctcgtcaagcgacgcgatgcatttgtccagctgcacgtggtctttccacagccgttcgacgctcttgcgatcaagcaccgtctcgccatccggcaggccgcgcagcgcgttcagcaccagcccgcgcacctgccggtccgtaccttggaatcgttggcgtggtcgcgtacgccgctgccccaatcccggtcttccgttgcgtaggaacgcgcattttccggcgatcggacaggcttcgcataatggcgatttcgcagtgcacaccgtcgcgccgagttccatgacggcctggttccacacgacggacgggcgatcgaaacgacggcatttcgcggaatcatcgtccggcagcagccgtttcgccagcgcgcgttccgcgggacttgcgctgccgccgagcgattcgacgccgacgaacgcacgtgacagcacacggcggatgttcgtgtcgaccaccgcgatacgttcgccgaaagcgaacgacagcaccgcgcttgccgtgtaatcaccgatgccgggcagagcaagcaattcgtcgtacgtatgcggcagctcgtcggcgtaatcgtatgcgatgacgtgcgcgcattcctgcaatcgcagggcgcgccgcggatagccaagccgcccccatgcggtgatcacgtcggatttcggggcgtcggcgagcgcggctgcgtccggccatcggtccatccatgcggtccaatacggcacgacgcggcccatctgcgtctgctggctcatcacttcggaaacgagcacgccccacggtgtggtgcggccgaatcgccatggcaggtcgcgcgcgttggtctgccaccattgcgcgagcgtcgttgcgatttcgtcagcatcggaagcatcggaggtgacggcggtggcggaatcggcaaagtcgtcaaagtcggcgtcacgtacggcggtgtcgtatgtggtgttcgtgtcgttcatcgttcctattcttagcatttatgacgaacgaagaacataccgataacgcgcagggcgcaacgcgcgacgccgagacgcaggcggccgaagccaaggtcgagaagatgttcgaatacgggtaccgcaagtccaattacggcccggacgaactggtgaccgacgcgcacggcaatccgatttccgtggtggacgcgatgctgagcgcgaaggacgcggcgaaggcggagacctccaccccgcacctgtgctactactccccgcgtattccgggcaacacgggttccgcgatccgcctgtgcgccgtgacgggaacgattctgcacctggtggaacctttgggtttcaatctgcgggataccaagctgcgccgtgcggggctcgactaccatgacatggcgcatgtggtgctgcacccgaatttcgaggatctggtggaatcgatgccggattcgcgcatcatcgccttcaccgcgcacgccaccaagctgtacaccgacatcgaatacaggccgaccgacatcctgctgttcggtccggaaccgggcaatatccccgatccgatggacatcatggccggcccgcatgtggccgagcaggtgcgtctgccgatgcgtccttcgctgcgtagcctgaatctcaccaactgcgcctccatcgccatctacgaagcctggcgacagttgaactttgccggcggtaagtaaaaacagttttacaaacgcaaaagagcccggccctccgtgcaggaaggtcgggttctttcgtaagaacgtcagttcttgaaggagtggatcggcgccggaatgcggccgccacgggtcacgaaggcctcgcagctggtctggttcaccggaatgatcggcgcgtagcccatgaggccgccgaagttggccatctcgcccacgcccttgccttccacggggatcacgcgcacggcggtggtcttctggttgaccatgccgatggccgcctcgtcggcgatgatgccggaaatggtggccgcggtggtgtcgccggggatggcgatcatgtcaaggccgacggagcatacgcaggtcatggcctcaagcttttcgatcttcaggcagccgttgttggccgcgtcgatcatgttcttgtcttcggagaccggaatgaacgcgccggacaggccgcccacataggaggacgccatgatgccgcccttcttcacctggtcgttgagcatggcgagcgcggcggtggtgcctggggcgcccacctgttcgaggccgatcttctccagcacttcgccgacggagtcgcccacggcgggggtcggggcgagcgagaggtcgatgatgccgaatggcactccgagtcggcgggatgcctcctgggccaccagctggccgacgcgcgtgatcttgaacgcggtgcgcttgatggtttcgcacaggaactcgaagtccttgcccttggcctcgtcgagcgcgcgggagaccacgccggggccggagacgccgacgttgatgaccgcgtcgccttcggtcacgccgtggaagccgcctgccatgaacgggttgtcgtccggggcgttgcagaacgccacgaacttcacgcaaccgtaggaatcattgtctgcggtggcgtgcgcgatgtccttgacgatgtggccgagcagttcgacggagttcatgtcgatgccggttttggtggagcccacgttcacggaggagcaaacgatgtcggtttcggacagggcctgcggcagggagcggatgagcattccctcagccggggtcatggacttggacacgagcgcggagtagccgccgatcaggtcgacgccgaccttcttggccgcgcggtcgagtgcgtgtgcgatcttgacgaaatcctcggagctcttgcaggagcttgcgccgaccagggagatcggggtgacggtgatgcgtttgttgacgatcgggatgccgaaatcgcgttcgatggcctggccggtggacacgaggtccttggcgtacgtggtgatcttgttgtagatgttctcgcagacctcgtcgacgctgtcggctgcgcaatccagtaggctgatgcccatggtgatggtgcgcacgtcgagcttctcctgctcgatcatcttgttggtctcgtggacctccatgatattcagcatggtttttccttacgattggtacgattcgtggcttcggttgcttgcatggcttacgtgtgccgcggatcagacgcggtgcatcttggtgaagatctcttcgcgctggcagcggatgcgcacgccgatctcctcgccgagcttgtcgaggtcgtcgacgactgtgccgaattcctcgtccgcgttggaataatccacaatcatcatcatgttgaagaaaccgtcgatgatggtctgggagatgtcgagcacgttgacctggtgcgcggaaagataggtgcagacgcgggcgatgatgccgacagtgtcctggccgacgacggtgatgattgccttgttcatggaactccctaaacgtgaggtgtgaatatccagttaccgcctcggcgaattgccgggcgtgcccccaagtataggaaacgcacgcgccaaaacacccctctctcccgcttttcgcattacatggtgagacgccacacgcgcatgtcagtagtcaaacgtttacctaggtcgtcaccgcccacggattcacccgcgccgtgtcgcaacacagcatgacatgcaacatccgccggcaaattacaacgcagcgcacatatcgtgcccatatctcgcacatatcgtgtacatacccctgcacatacggcagcggccccgcacccgccgtgtcacaaggaacacgcaggaacggggccgccggatacggctctacgtcttagcgccaaataccgttcaatgcacgcgcatcaaccgcatcgatcttgccggacgacgcgatgcgaagctcaccgtcgccatcagcgccttggaacagcatgcttcctgccgtctgaccgccattgaggaacacttcgacaacattgcggtcgaagaacacctccacctggcgaacatcggtgatgccgctgtcgaagtcgacatcctccaccgcagtgcccttggccaccaggcgggtcacgccatcagtgcgctgcagcagcagttcggtcggcctgccgtcctgcgggttgacgcccttcgccagcaccatgatggcatcggcatcatccgccagatgcacgttcgcatagtatgcgttgccgggagccgtaacgaccatatccccgccatcgccgtacacggcaagacgctcgccgagcagctcgcggtacacttcgctcaccggcttgctgtacagcctgccgtcacgcacatgcaattcgcgcggcagcgacatcatgccgttggccaggcacggctgttcgacacgcatctccggaaaatcggtgaaccagccgaatacgatgcgacggccgttatcgtcgacgaagctttgcgtggcgtaatatccggtgccgaaatcgcaccagtcgctggccttgacatccagtttcggaccattatcggtattcaccaagtcgccggcataccagcgcacctgctggaaacgtccctgcttgtcgcggtaatgcatcagcgcgcccacggcaacggtcacgccgtcgacctggaacaggtcagggcattcgtaggtgcgtgcgatctgatggccgaaatcggcgagcaccggcccttcgtagcgccatgtcacgttacgcttgagcggcttcttcgcggagaacaacgtcatggcgggaacggtggcgttgttcggctggtcgacccccggcttgccctgaggagaataagtgaaccagccaccggtattctgggtgctgatgccgggaaccgcactatcggcggcgtctgcgccaaattccgataccggcagattggtggcggttaccatataggcacgatccgggtcgagcgcctcgccgcccatgccgcattcaaccttcggatcacggaagtcatagccaaaatcgtcattcgcacgcagcgccaccggcgattccacgcgaacatgcacgccgtcctcgcacaggcaggtggtctggtattcggtgacggaggattcgtcgccgcgggtttccagatgacgggtcaggtacaggcggatggcgtttgcctcgttgccggcgaccggattgtcatgctcgtccacggtcacggccgaaccggagaacgcgccgccgacgatacgctcgtcggtgtgcagttcgggctgcggttccaggaagactggcagatgagtccaatgcaccagatcacggcttaccgcgtgcccccaatgcatattgtcccagccgaaaccatacgggttgagctggaagaacaggtggtagcgcccttggaactggcacaggccgttcggatcgttcatccaacgtgcgaacggttcgaaatgcgcgcccgaacgcccgaaacggttgtagatctgttccagcgtgggctgtgcaggccaatcggtgtcgcttggattcatgttcacgtagcgaacgccgttgtcaagcaggtcatcgcattcggaaaggtagccgaagcgtacaaccaggccgcttgccgccacggtgacggtggatttctgcggcaccgcaatggagaaatgatgcctgcgttcggcgatgggcatggtgtgcgccgcgattgcgacgccgttgccgtccgcaacggtgacgacggcgttcccctcgccacagcgttcggcgaacagatcgaactgccggtagccgccggtttcgacggagatggaataggtattcgacatagtagacccctctacacgtgtgaaatgaatatggaaaatggatggaaatactcaaagacgcagtgccgtcaggaaacgatcgaatcgcgttcgatgatgcggcaacgcaacggtgtcatcgggccgttctccgaacgcctgatcgaatcctcactgcgtgcaaggctttccgtggcggcttcatcgtcgatcatggcgaccagctgatgcaccgcttcgaagcccatttcgtagtgaggaagctccaaggtggtcaacgcgggtttgagcacgtccgtaatgagcggctggttgtcgatgctgatcacggaaacgtctgtgccgatgccgaccgaccgctctctggccgcttcgtagatgaaggtcgcgcgcacatcgttgaagcagaagatgccgtccggcttgatctcgtcgaacacgcgaccggcttccgaagcggcgtttgtggcctcttccacgttgacgaccaactgctcgtcgaaggggatgcccgcgtccgcgagcgctcggcgatacccggcgaaccgctccccctgggcgataatggtgattgaggaaccgtagtaaacgatgcgtttgcagccggcctgaatcagccgattggtggcatcgtaccctgccatttcgtcgtcggggtagatcgagggaatcttgcgattctcgtcttcgctgtcgacgacgaccgtggggctgccttcgagttcggcggggatctccacaacacggtggtacatcatggcatacaggaaaccgtccacgcggtactgccgcagggccgcgatctcctggttctccagttcccgatcgtttcccgtgttgacggtgagcagaatatagccgagcttgcgcgctgcctcctgcgctcccaccagtacgcgcccggcatgtggcgtggtggcgatctcatcggtgataaagccgaggacatacgacctgctggtgcgcaatgtacgcgccacggagttcggcttgtatcccattgattgggccgttccgcgcactcgttgcgccaccgccttgctgacgcgattgcggtccttgttgttcatgaccaatgacacggtgcaaatggagacgccggcctcttttgcgatgtctttgatcgataccaatggttttgccttgtctgcttggcggctttgtgaagcggattccattgtatgcccgcctttctttggcgacactctgccgttcagcttttcgcgtatcggatgcccggctgctcccggtcatggatgtccattcccggaatccggccgaacgagtacacgatccacgcagtgcagaacatcggcagcgacatgccgaacaccatgagcagacccggccattgcgcccaggcaaggatcgccagcagtgcgagtccaatctgcagcagagtgcacagcggacgggccacgatcatggtcagtgttgtgcggacgatccacagcggacgttcgtcatagttcgcgcgcaccacccagaccagcatggtgaaggccagcaataccagcgccaggacgaacagcacgccggagacagccacatcgaacgttccccgtgcgtgccagttcatcatgtagtagtcgagggcgagcaccacccagcacacggccaacggccagccgaaaagattcgcctgcttgagttcgttcttccatgcagtgtggaagatgccccacacttccttggctcgcatcgaacgatcctctgcacgcagccacgtacggaacgtggtctgcgctgcggcgcaggacgggaagaatcccagcaccacggcaccgagcagcgtgtgcgcgaccatggcgacgttcaccacgaaaatcgtgagcagcagacgacagaaccgttcgtaggccacggaaaaacgggcaagcatggcgaatcctttctctgttcggcggccttgggccggttgcgtttcggttgttgtggcgatcagcccttgacggcgccgagcatgacgcccttgttgaagtacttctgcaggaacgggtacagcaccagcagaggcagggtggagacgatgatgatgccgaacttgatctggtcggccgcctgctgttgggccgcggcgttgacgttcgtaccggtgccttgcgccaccagcagcaactgctgcaagaccacctgcaacggctgctttgtgtcgtcggtgatgtagatcaagcctgtcatgaagtcgttccagtggccgacgaagtagtacaggccgatgacggcgaggatggcggagctcaacggcagcacgatcttgaagaagtagccgaagtagctcaggccgtcgatctgcgcagcatcatgcagttcctccggaatggaggtttcgaagaaggagcgcgccacgatcacgttgtatacggagacagcgccgggcaggatgaacacccacatggtgttgttgatgccgagggctttgtacagcaaatagttcggaatcaggccgccgctgatgaacatggtgacggtgaacaggaacatgatgacgcggcgcggcttgaattcgcggcgggacagcgcgaaggcgcaggggatggtcacggccatgttgaccgcggtgccgaccaccgagtagatgatcgtgttgagatagccctgccagatgcgatggttggcgaacaccttcgcatacccgacgaaggtcacgcctttgggcagcagggtcacttcgccgccggccacggcattcgggtcggagaacgatgcgatgaccacgaaccacagggggtagagcactgcgaccacggtgaacaccagaagcagcacgatgacgaagtcgacggccagatcacctggcgttttcttctgacgtacatgcttgttccagggaatatcgttcttgctttgggcaacggccccggttgttgttgcagacatgatgactgcctcctagaaaatgctcgtatcggaaacgcgcttggcgatcgcgttcgcggtgatcaagaagacgaagttgaccaaggtattgaacaggccgatggcggtcgaatacgaatactggccgttaataataccgatcttgtaggtgtaggtcgcgatgacctcggtggccggcatattcagcgaattctgcatcaggtagatcttgtcgaaacccacgttgagcacggaacccatgttcatgatgagcaggattgcgcaggtcggcatgatcgccggcaggtcgacgtaacggatcagttgcagacggccggcgccatcgatcttcgcggcctcgtacagcgaggtgtccacgccggcgagcgcggccaggtagatgatggagttccagccgacgtgctgccagacttcggagatccagtagacggcggtgatggcgctggtggagcccatcagcgattcgtcgccgaagaagcggcccaggatgccggagcccggggacaggaagatgttgagcatcgagacgatgaccaccacggagatgaagtggggcatgtaggtgacggtctgtacgaagcccttgatcttcttcgagccgatctggttgatcagcagggccaggatgattgggaagatgaagcccatgaccagcgtccacagggagatgcgaatggtgttggtcatgatctcgccgaatagcgggttatggaagaactcgttgaaatatttgaatcctacgaacttgccgccggtcagacccttggtcgggtcgaattcacggaaggcaagctggatgccccacatcggcacgtaggcgaacaggccgacgaagaacagggcgggagcggtgaggatccacagctgccagtagcggcggaagtggtcggcgatgcgatcgagcagacctggtttcttgcggtcgggagccgcttccatcgccacggtccgtgcagcaacgccttgcgatgtttgtgcactcatgttggtctccaatttaggatgattgctagggaacaaaaatgcggggtccggcggcagtcacgggagagaaacgaacccgtgcgatggaccccgcggtattacttggctacttggtgtacttgtcgtaccacttctgccaaatcttgatgttggcgtcgaggccgagggtcggttcggacaccttcttcacgtaggcatcccattccttgtcgatgccgcccttctggacccacttcgcgatctggttgttcgcgtagttggagatggcggtgttgttgttttgcagggtgttggagtcctcggtattcgggcgcacgtaaatcggtacgacatccttgacgccgtcgacacggttgcgcgcctcacgaatggccaaatcggacgcagtgacctggtcggcgttggtgtcgttgaccatcttcacgtcgtcgcgaatccagccaccgaagcggtcctgcagggcgacggcgcgggtatcaggatattcggcgtaggctttagccttgtcgatggtgtactggtggtcgccgtcatcggagacgatatccggaatagagccgaagaatccagccacggaaagcttctcgccgtacatggcgtcgatcaccttgtagatggcgtcctggttggctgcgttcgggttgacggtcaggccggaaccggagtaggcccagcggcaggcgtcctgggaataatcccacttgacctgggagtcgggcgtggaggcgtccttcttcagcggcggcagggtgacgtactggtcgccaagcgcgttgccgtattcggcgtagttggaccaaccgaaggagacgccggtcagcgcggtcttgccgtcactgacggtctgcgaagtgtattgcgaggcgtcgcgggtgagcacatccttcgggataaggcccttggccatgagtccgtgcaggtaggagacgacgtccttgagcgcgtcggaggtgtaatagctcttaaccttgccgttgtccacataatagccctgttcggaagcgccgccgcccatgaaggaggtgaccacgccttcggagttcatcagcgccagagggctccacaggccgaagccgaggctgcggatattcatcggcacctcatcagccttgccattgccgttcggatcctgggtcttgaatgcatcgagcacgttctcgagctcgtcccaagtggtcggcatctggagtcccagcttgtccagccaggtcttgttgatgaacatgtgagtgccggaaacctcgtaacccttgccgcggtcggagggcagcatggcgatcttggtgccatcggtaacgtacttcgcggcgcccggctgggccttgaggaacttcttgacgttcggcatcttgtccagatgcggcttgaggtcctcgaaataggtgctgtacttggccgcatccaccatgctgaacaagctcaagccaatgtccgggaattcaccggcggccatcttggcgctcttctgctggccccaagcgttgtcggagacttcctgccacttgatggtgcaatcgcaggcggcttccagatccttggtgtactgggtgtcctgcatcggatgatcggtcacgttacggcggacaagaatattgacgatcggcttgccgttctcgtccgtggtggcctgcttgttgccgcaggcggcaaacgtcgtgaccatagtcgcgactgcagctattgatgccaataggcgaacacttcttcgtgccatgattaggctccttcttccttgatgtttcctcctcgcaccgatgtaagacgcaccggtacgaccccgtcagccacttgctttgtggttgtttctttgcggtggttaacactataaatcattaatcgtttaatgtcaaacgttaatcgtttatctcaatagttagcgctctcatcgaccagccccccagcgtcgcaaacgtaaacttcggctccatactgccgttcttgcagaacaccggaatcacccacatcgcgacacgccgttaatcgtataacgtatcgtttttcatcaaatacacgtgcaacccgtccgttgtacgcacaaaagcgtagccgaacatgacggccaccaagtcgacacgtcgctacttacgaaaggtgctcccctccttcagaaagaaggaggggagcacgaatacgatcacagacagcaccagcccaaacacgtagccgcaccgggagccgggatgaagcattcggcatcgtacctgctggtcatcgccgtggaatacgctggtgcgccatctggtccacaagtaaatcgtgcaaaaacgcgcgttggcgcacgtcctttttcatgggcgtgcgccaacgcgcatttttgcatcggcttctgcgatcaagcctcgcggctcgcggaagccgcagcgaacgccggcaaggcgcgaggcgcgttgaaaccttccttttcgaagcggtcagcaatcttctgtgcgatctcgtggccctggcccttgtccaccagcgcgatgatggagccgccgaagccgccgccggtcatacgtgcgccgtacgcgccgttgacacgagccacatccacggcaatatccaactcgggcacagtcacttcataatccgctgcgagcgaatcatgagacgcgttgaacagtcggcctgcctcgtcgatcttgccgttggcgaaggcacgcacgaaggaattgacacgggcgatttcggtgatgacgtggcgcacgcgcttcttcatcgtgtcgtcttccagcttgtcgagcgtttccttgagtgcctggaacggatcctcggatttagcgatttcgtcggcgaccacacgcaggttggccacgccgaggatttcggcggccttctcgcaagtggcgcgacgctgggcatactggccgtcgttgagctggtgcggagcctgagtgtcaagcaccagcagttccagaccgtacttgtcgagatcgaattcctgctgggagacgttctccagcgggctcagctctggacggcaatcaagacgcaacgcatggccgaaagtgcagcgcatggatgcgttctgatcgagaccaccggtggacgcacccgccatgtcgttttccgacttgatggcggcgttgatcagcgtcacacgaccggcatcggatgcgccataacccaaaccatacacgtcatccagcgccaaggcggtggagcaggtcatggctgcggaggagctcagaccggatccgagcggcacgcaggaggagaatgccgcgtcgaagccctgcaccgcatcgaagccggcttcgcgcaatgcccaggcaacgcctaccgggtaggcggcccagccttccacgccaccggcctgcagaccatcgaggtcggcttcggtaacgtttccggaatcaacgtcggaaaccacgcgcaccttggtgtcttcacgcggcttgagcgcgatgaacgtgcggtgcggcagtgcgatcggcaggcacaggcccgcgttgtagtcggtgtgttcgccaatcaggttcacacggcccggtgcggcccatacgccagccggttcctcaccgtaggtggctcggaacaggtcggtcgcgttcttcacaccctcgtcatgcgagagcggctcaatgaattcaacagcagtcattggtgttttgtcctttgggttttattggctttcagccttcgatatcgatcggtccgagctcgtggaagcgcttggcgatgagttccggcgtggtgtcggacacccatgcggccatgcctgattcggagccggccagatacttgattttgttggcggcgcggcggaacgagaagaactgcaggttgaggcggtagttttcgcggcgcttgtcgtggatcggggcctgatgccatgctgcgatgtacggcaggtccatgcccttgccgtcgcccttgtcgaagaacgcgttgccgcgcttgagcagggtggagtacatgacggccagatcccaacgctcctgatcgttgagctcgtcgagggtgagcacgtcacgcaccggggccacatgcacctcgagcggccagcgtgccgcggccggcacataggcgacccaactgtggttgcgcatgacgatgcgctccccggcctcgatttcggagttcatgagatccttgagcaggttgccgccggtcttctcatggtaggcttcggtctgcttgagttcggcttccatcttcggtgcgatgaacggatagcagtagacctggccatgagggtgcgccagggagacgccgatttcctgaccgtggttctcgaacgggaagatctgctcgataccctccatcttggagatttcggcggtacggaacgcccatgcttccacgacggtgcgcaggcgggagaccggcaggtccgccggcaggccgtcttcatccgggtcgaagcagatcacttcgcagcggcctgcagcgagcttcttctcccacagcgggttaccgttgacgtattccacggcttcggaacggcccggcacgcgcaccatcgacgggaagcggttttcgaacacgaccacgttgtagtcggtgtccggcacttcaccatcctggtacggatcgcccggcttgcgcgcggccagcggattgcctttggccgtcgcgcccggaccggcggtgatcggacggttcatacgtgcggtcgccatcggaatccaatcgccggtcagcgggtcgcggcgcatttccggagccgcgtacggcacttcctcgccggccgcgttgagctgattggagaaacggtacggaagttggcgcggatccttcagttcgcgagtcttgacgccggaaacgtattccggatcgtcgtcaagatagaagaagtcgcggccatcggcaagcgtggtcggcgtgatacggatatgctccttcgcatattctcccggagtgtagttgacgaaatcactcatgtgattattcaccttcctgaaccggctcggcctggcgtgccagaacgagctctttgaccaaatcccttgttttcgacaccgaatcggggtccaatccgtcatcggtgatgaccgtatccacctggtcaaaacgtgcgaacagcgacagtgacgtgcagctccacttggtgtggtcggtcaaaattatcgtgcgatcggcaatgtccatcatcgccatatcggttgcggcttccagcgagttcggcatgaggaaaccgcgcggaatggacacggaatgcgtgcccaggaatacggtgttgacgcgcagcgaggcgaccactttgtctgcgatcggcccgacgagcgagttggagcgcgtggtgacgccgccggtgacgatgacttccacgtctttcgattcgagcgcctgcaccagctccgccaccggaatggagttggtaagaatggtgatgcccgacgattgctgcgattcgagcagatgttgcgcgaacacgtacgccgtggtgccgccgccgatggcgatcacgtcgccgggggccacgtatttgacggcttcctgtgcgatggcgtccttcagaccgatgtccatctgcgactttacggagaacagcggttcgctcagcagcgtgctggtgctgacggcgccgccgtgcacgcgcttcagcagacccttgtccgccagatcggcgatgtcacggcggatggtcatcgcggagacgcccaattccttggacagtgcagtgatgcgcaccgcaccacgggtacgcagacggctcaaaatcaaatgctggcgttgcgacgaaatcatatgaacattatcgcacatgttcactcaaaaatacaactgagttgagcgtttcgcgcgtgtttcacgcaaagccgcaccacaatcgactcaaattcagcctaaaacgaacaaaaacgaacgtcctatatgccgcatcgacacacatcggcttttgcccaaaatgccatgcgaaaccaatgaaaacgtgcgagaataaggaaccatgacatacgtttccgaaaacttttggcacgacgcagtgaacaaagccaccaccgaccttttcacgttcggctacaagcacatcatcaaaccgcatttcatcttcaaccagacgcccgacgtggcccacagccagatgatcgatttctgcaaggtcacccgcaatattccaccgctgatgtggctatgccgcgaaatgctcgactacaccgacccgatactggaaaccaacgtgatgggcgtcgacttcgccaatccgttcggcctgtccgccggcctcgacaaggattgcgagatgccggtactgctcgacaacgtcggcttcggtttcgaaacggtcggctccaccacgtcgcgcccctgccccggcaacccgcgcccatggttccaccgcctgcctgaatacgattcgatgatggtgcacgtgggccttgccaacgagggttccgcggtggtgattccgcgcgccgagaacgcatggacgaaggcgaagagcatgcaggtgtcggtttcgatcgctcgcacgaacgacagcaagaccggcgatctggacgaaggcatcgaggattactgcatttcgatgcgccgcgcggccggacgcaccgccatggtcgaagtgaacatctcctgcccgaacaccatggccggcgaaccgttcaaccaaagcccggaagcgctcgacaagctgttcaccgaactggacaaaatcgaccgtccgcagccgacgctcgtcaaaatgccgttgaacaagacgtggcccgaattcaaggatctgctggacgtgctcgccgagcacaacgtgcagggactgtcgatcgccaatctgcagaaggaccgcaccggcatgtccattccgcgcgattgggagggcggactgtccggctcgccatgctacgcggccagcaacgaacgcatcaagcaggtctaccgcgagtatggggaccggttcgcaatcgccggcatcggtggcgtcttcaccccgcagcaggcgtatgagaagattcgttgcggctcgtcgctggtgatgttcatcagcgccctcatgtaccgcggcccacagcagatcaccgtgttgaagcgcgggctcgccgaactgctccggaaggacggtttcgagcatgtcagcgaggcggtcggcatcgacgcgtgaaacttttttaattccgatttaagttgcgatttaaaaagcgatttttcggcaatataaaggcgattaataagtaaaaaacagaggcgcgtctccgtgggagggcgggcgtcctgttcacgacacactcaaggccgttcggccaggcttacggtcgtgaacaggacgcccgccctcccactcgtttttttgttatgttgcgttggggtgttatccacttttcgcaataagaaaaaaggaggaggggaaggagggtcagcggaaggcgccgcggaggtatggcggctggtagggggcttcctcgaccggcacgtccagtttgtgggcggcacggagcggccaatacgggtcgcgcagggcggcgcggccgatttccacggcgtcggcggcgcccgacttcagaatcttcttcgcctgcttcggcttggtgatgagcccgactgcggtggtgggaatgcccgcgcgactgcgcacctgttcggcgaacggcacttggtagtcgggcttcaccggaatggtcacgtcgggaatcaatccgccggtggacacgtcgatcaggtccacgccgtgggccttcagaatcttagccagttcgacggtctggtcaaggtcccaaccgcctgcggcccaatcggtggcggagacgcgcaccagcaccggcatggtatcgggcacgacggaacgaatcgcatccacgacttcgaccagcatgcggacgcgattgtcgaacgatccgccgtactcgtcgtcacgctcgttgatgagcgggtcgaggaactgcgacagcaggtagccgtgcgcggcatggacttccaccgcgtcgaagccgatgttcatggcacgccaggcggcgtcgcggaactggtccacgatggtgtggatctcatcgacgctcagcgcgcgcggacgagccagggaaccgtatgcgttagcgcttgggcaaaccgtccgccatccgccttgctcttccggcacgctctgtccatcgaaaccgatcgcgtggcagccggtggaacccttgcgtccggcgtggttgagctgcaccgccatcgtggcacccgctgccttcgcgtcggccacgatccaacgccatgcgtccatctgtccgtcatcccacaatcccagatcgcacggcgaaatgcggccttccggcgcgacggcggtcgcttccatgatgatcatgccgaagccgcccatcgcacgcgaaacgtaatgctggtagtggaacggcgtcggcttgccgtcctgcgccaatgcggaatacgtgtccattggcggcagccagatgcggttgcgcacggtgacgccacgcaacgtcatcggatcgaacggtttgaccgtcttgttctgcttgccgttcttcttgtcttcgctcattgtcatctctcttatgaatcgttggtatcgcctgaatcgtcgatatccgtaccgcgttcccacgcgacgggcatggtaccgattgcattgtaagcagaacgcccgccggtcggggcgggcgttcatggactgttcactttgccatgcgatttacgctccggtgacgtgggcagtcagtgcggtcagtcaatgcgggcagtcggcatgaatagccgacaatcgcaactattgatgctgctggtcactttgctgctcagcaggctgttgctgcgattgctgctgctggccttggttggtctgctgctggctttgctgctgactgttctgctggcgctggtattggtactggttgtatgttctggtggcgcccttcgaaaccgtgtacttgtcggcaccctttccgtaatcgttgtcaatcggcgcgttgatggcggcaagatacgtgttcatgaactgcttccacgccggcgttgcgatgtacatgccgtaccaagacgggcggtacacgccgttgatggtcttgttgtcgaaggtgttgttgatcgggtcctgcgcgtcggcgaccgcgacgaacgccgcgacctggttcggcacgaagcctgcggtggccatcaccgtgttctcgttggtgccggtcttggcgaaggtcttgcgattgttgtcaagctgcgtggtcgacgcttcgccgccaggctgcacgacaccttggttcagcgcgtaggacacggtctgcgcgatgtccgggtcgatggcctgatggcagttcgcggacggcactttcaccttgctgccgctgcggtcggtcaccttggtgatggcgatcggagtgcattccacgccgttggcgcccatggtggcgtacacgttggccatggtcaacggcgacgcctgcaccgtaccgatggtcattggcggctggaacgagttagcggagtagatgtcggacgcgttggagatggcgttgtggtagcccatctccttggccgcgtcggcgatcgcgcacagaccgatgttcgacgccatcgaggcctgcgtggtgttgtgcgacttgatcagaccctgcagcgggctttccggagaggtggtgccgccgccggaattctgcaccctccacgggccgacgaaaccgtagccgttgcagttgaacttcgacgtgtcgtagacggtggatgtgacgagcgactcgttgatggagtggcctttctgcatccacgccaccatgttgatgggcttccaggtggagccgacgttgaagcccataccgccgccgtcctcctgatcgaccatgtagttcatggaggtcttggtctcatccgttcgggcgtcatccgtggcatcgtaggttcggttgataccgaacgacaggatttcaccggtgcccggcttcacggccgctatcatcacttcgaatccggacgggtctgtggccggcacggtgctgttcgccgcctgcatggccgcgttgttggcgttgcggtcgagcgtggtgacaatcttcagaccgccttccttcagcagcttctcgcgagcctcgtcgtccttgccgaacgccttgttcttcaggatctggttgaccacgtacgagcagaagaagccggtgttttcaatggccgactggcatccggagctcacgtcctgcaggttcagcgtgtccttcaacggcgtgttgatggcgtctttgaattccttttcggaggtgatgtagccctggtcgtgcatcagctgcagcacgatgttgcgctgatgttcggcttccttctggttggcttccacggaaggatcgaagttctgcggattcttggtgattgccgcgatggtcgccgcctgggtcacgttcagttccgaagcggagacgttgaagtagcgtttggcggccatttccacgccgcacaggttgttgcggccgaactgcgcgatgttgaggtagccctgcaggatctcggctttggagtatttcttttcgatctgcaccgagatcagcatctcgcgcagcttgcgtgccacggtgtcttccgtcgcatggtattcggcgatcggatcgtcgtcttcacgggcttgggtggacagcacgttcttgacgtactgctgcgtcagcgtggaaccgccctgctggtcgccgcctctgacataggtttggaagaacgctcggaacacgccctgcacgtccacgccggtatgttcgaagaagcgcttgtcttcacgggccacgacggcctgctgcatggctttggagattttcttcagcggcacgacctcgcggttctgcgtatagaattccgcgaaagcggtcttgccgtcgttgaaatacatcgtcgagcgttgcggaagcgaggtcacatcgaaatcgatgccttcgaccgcaagggacggaatgacggctttggccgcgttattggcggcgaacacagcgggcataaagaaaatactcgtcacaacgccgccgcccacgcataacgtgatgtatgcgattaccaatgcgagcacacgttgaacggtaagggtcttcttcttgggcatgacgcccattctaaagtggcgggtctactaaacacatgcccgccaacgcatgtgccggaagccgtcacgggtttctcacaaaacagacaatttcttaggaaaagttggaaatcagccgaaaaccagccgaatgtcatcgtcttgatcggcgaatcagcatgcccggctggtagatgatgatggaccggccttccctggcgatccatccgcggttagcgaaatccatcaacgccttgttcaccgtttcgcgtgaggatccgacgagctgcgccatctcctcctgtgtcagatcgtgcggcaccttcaggccggcttcgaccggttcgccgaatcgtgatgccagattgagcagtgttttggcgagtcgtccgggaacgtccatgaacaccagatcgcagatgcgttcgttgttgctgcgcatgcggtgcgccaatacctgcagcatgtccacggccacgcgcggatgttcgtcgagccagtcgaacagcgcgtcatgttccagccagaccacacgcgtgccgttggtcatcgccaccgccgaagcggtacgcggtccgccatgcggatcgaacaccggaatctcacccaacacttcgccgtacgcgtggatgctcagcagctgcacacgcttgtcggaggattgtctggtcagtttgacgcggccttcctccagcagatacatgcgatggtcggtgtctccctcgcggaagatgaaatcgcccttgtcgtattcggcatgcagcagatacggcagcagttcccgggcttcttcggacgaaacctgcttgaacagcgcggtgtgcagcaacgtctcacgctcatcgtcgaaaccaccaaaaccattgattccgttggttccattcggggtgaccatcgacgtgcctccgttccgccgtgcttctgcgttttccgttgtcgacatccatgccaacgctcgttaagtcgggcaccatcgaccattcgggctacattgtaactcgaacggcggcgtcgaccagtcgcgccactacctcgtctcggcccatgccggtttgagagcgcatgggatcgacatgttttgccgctgatttcaccgctttgtcggacattttctctcgtgagatgttcaacacgcgggtcatcttttccgcgtcgatgtcgtaggcgagcgtgacgtggtgcagaatcgcgccgggtccgccgtgggtgggcgcgaaccggcgttgcgcggcgccgccgagtttgccatattgtgtggcgatgtcgttgagtccggcgaatcgtacgttgaggccgagggcgcgtaacgcttcgacgagccagtagtcgcagagttcgtaggattcctcgacgctcatgccgtgggcgaagtcgagtggcgcgtacagcgagtaggtgatggtgttgcctggttcgatgaacatcgctcccccgccggtgcagcggcggactatgtggaatccttcgtcttgcgcggtgcgcacgttgacttcgtcttcgagcgactggaatctgccgatgaccacggccggctcggcccattcccagaaacgcagggtgggtccgcgggttccggcagccacttcgcgtgcccattcgacgtcgaggtccatttgttcctgcggtttgcgggggtcgtcgtgcacgatgttcggtttgagtgcgtgccagcgtcgcgcgtattccgcccaattgccggtttcggcgatttcgccggttccaacggttccagcgttttcgtcgctttccgcggttccagcgttttcaatgttttttgcgatttccgcggtttctgcggtttccattgggctggtatgccgccgaatgcgcaggtcgtcgcgtggttccactttcgtaacatcattaccgccgataccggcaatgccatcggcgccatcgatgccgtcaatcgcacgttgaaaggcgatggcgatgccacgcgcgcccatgccgacgatgcgcacgtccggatggtgcagcatcgtccgttcgacggcggcggtcacgtcacgttcggaaaccatcgaaccgctgaggcaacgggccgcgcactgttccagcgcacattccatggaatgcaagagattccgcgttccggcatcgtccccgtcgaggaagaaatcgccgtcgatatgacattcgataacagtcgatgatgcagccggcccagcgtatggaaccgttttcacggcattcgtatgagccgaatcaatataatccgaatcggcgtaatccgaatcggtacaatccggatcggcatgagaaagccggacagtcactccaacgagtttgccgcccggctgtttgtaaagtcctcgagtcatcaatcctgcagttcaacgccgtgggcgtcacggtgccattgcgagccgtagtgggagcacagaatcaggatgccttccaccagtccccagatgcctgcgacggctgggccgatgatgagaatccagccaatgacggtcagcagcagctgtgccacggccttgccggtgttgcccaagtagaagttgtgcacgccgaagcagcccaggaagatgccaaacagaccggcggccagtttcgacttctgggcgtatccggccggtgcgacgggctggccgtatgccggctgctgcgcgtaggcaggctgggtataggcggattggttgtaagacggggccgcgtagccttgctgtccgtagttcgcttggttgtaatccggctgggcgtaagcgttgttggggtcatacgccggggctgccggctgaccgtacgacggctgcgcagattgggcaggctgggacggctggccatactgaccgtactggttgtacgatgcggcgttcggatcatataccggaccagcgggcgtggccggctgagccggctgggtatagacgggagccgtaccgtatgccgaggccggagtcgccggctgaccgtatgacggctgagcgatctgggccgactgtgcggtctggccatactggctgtatgcggaagcgttcggatcgtacgccggaacggcaggctcggccggctgagcgggctgagtgtatgcggcggagttctgatcgtatgcgggggtttccggctgcgactccggatggttcatctgcgcatcgttctgttgtggaatgtacggttggttgtagtcggcctgggctgcgttatccgacgttggattgttgacttgaccggcaccattgaaatcggcgttgttatcactcatgcctcaacaatatcccaaggtttgcccgtcatcgggcgtttaccactggcacgaaccccgaaaaacacctgaaaaatcccctgattatgcgaagacgcccaccgttccaaggaaaaccttgtttcggcgggcgtctcaccaaatggaacatccaaatggaatgtcagcgaatgccaatcacatgcgggccaggatgtcgcgtcccacctcgtcggtggtgcgcgtggtggagccaagctcttcgatgtccgcttcgacggcggcatcgatcttggccgcggcatcgtcgaagccgaggtggcgcagcagcatggcggaggacaggatggcggcggtcgggttggccttgttctggccggcgatgtccggagcggaaccgtggatcggctcgaacatggacggatactcgttggacgcgttgatgcatcccgaagcggagtagccgacgccaccgaccacggcaccggcctcgtcggtgatgatgtcgccgaagaggttgtcggtcaggatcacgtcgaagcgggacgggttggacaccaggaagatggtggtcgcgtcgatgtgcaggtagtcgtgggagaccttcgggtattcctcggccaccttgtcgacgatgcgctgccacatgtcgccggcgttgaccagcacgttcttcttgtgcacgagggtcacgtgcttcctgcgcttcatggccagctggaaggcgtaacgcaccacgcgctccacaccgtaggcggtgttgatggagacttcggtggccacctcgttcggggtgccacggcggaccgctccgccggcaccgcagtacaggccttcggtgccttcacgcacgacgacgaaatcgatgtcacccgggttggcgagcggcgaggtaacgcccttgtacagcttggacggacgcaggttcacgtactggtccaggtcgaagcggagcttgagcagcaggccgcgttccagaatgcccgccttgatgcgcggatcgccgacggcgcccagcaggatggcgtcggtcttcttgatgcgctcctcttcctcctcggggaggatcgcgccgtcacgcagatagcgttcggcaccgaggtcgaaatgctcgtaatcgaattcggcgacgccttcggccgccttctccagagccttctgggcccacggagtcacttccttgccaatgccatcgcccggaatgacggcgatggtgtacttctttgcagaatcactcatagcacgcgactctagtcaacgaatcagcacgtggacttaaaacgctcaactagtggacattccttgccgcgttcatgtgcgaatacggtttcacccggcttcaaacgccacgaacaacgaacaatccaatgatccggacgcaacaatccatacaccgtacatgaaaaagggggccgacctgaaggccgaccccacccttggattccaacactcagcgaacgctcttgggtttcacataatcctcggcgacggaaccgaaattcgtgcccgagaatttgcccgattgtctcactatggcatcgaacgctgccaacccgttcaatcccgtgtaggaatcggaatacgcgccggaatagctcgtcgaagatcccgtcgaaccggacgattccggcttcactaccctgttctcccgcgaccacaacgcatacagcgtgccgtcgcgatcgatgggcatcaacgatttcccggacgaatcaaaggagaccacgctgactgcgagcgcgtcgtctttcaccgtgctccacccttcgaaggtgtagccgtcaagctgaggctcgttggcgatgtccgccgtgggcgagaccagcgaatcaccgtcgtagactttccgctcggcgtacagggtcttcgcatccttgccggcgggcgcatgccctccgttcagatcgaaggttatggtccactggtgcgcggtgcgcacccactgcgcggtcagggtgatgtcgccggtcaccttcgagccgaaatcgtagcttttgccgtcatactgccagccggtgaaccggcagtcgtcgcgtgtcggcgacggatcaggcgcaacggccactcctccatcgtccacggtctggctgttcacggcactgccgccggccgtgtcgaaggtgaccgtccatgtcttgacccacttggcatacaaggtcatgtcggcggttacggcggtgccagcatcatagtccgtcttccgctgttcgtcgctggtcaatcctgcgaaacgatatccaccgcgggaaggagcggaatcggggatcgtaagcttctccccttccttgacgaacaacgtcatatcctgcggcaggtccgacgaataatcgtcgccgtcattcaaatgaatggtgacggtatggtacgtcgcgcccgcatcatcccacttggcatacagcgtgataccgccggtgacgggcatgccgaaaccgtacggcgtggtgccggccgcatccgtggtccagccgacgaacgtgtatccgtcacgggtcggtgtggcaggttgcgtcgcgtaaccaccgtacgcaacctgttgcgcatcgaccgcgctgccgccttgcgagtcgaaggtcacggcgtacatgttcggcgtccacttcgcatacaaggtcacatcatcgttcaccgcagccgtgaaatcgtattcgctacccgaagtgtcggcgctagtataccatcccgcgaacgcgtatcccacgcgctcaggattttccggtcgtacggccgatttccctgtttgcacctgttgtgcggcgatctcgctgccgccttggacgtcgaaggtcacggttttcgcttccgtccactgcgcatacaacgttatcggcgcgctcaccgtggtggcgaaatcatactcatgttcaccggccacgtccgtggtccacttcgagaacacgtagccgtcgcgagtaggcgtttcgggaacgctcgcagtgcctccgatggcgaccgcctgtgcgggaacgctgctgccgccttgggtgtcgaaggttattccggccacgttcaccggatgcgtgtacacggtcggatccccgctgacgatccagaattccgcgacgccgttttccacgtttcccgcggtcatgctgatcacggattccggaatctcgcgatcgttgtcgtcgcagtccttgccggtccatgatgagccaccgttgcgaatgatgaaccatgggttgcgcacgcctttggctgtctggctcagcgtgtattccgcgacctcgccgaattcgtcatgggaggtgaattcctgggattcgccgctggtgctttccgcataccaagaccacagatcccagcctttccacgcgtcggattccatgctgtattcctgataattgccgtcgggacggtaataatgcagtttgatggtcaggtttttcggatttttgatgtcattcggctgcggtgtcgccgagggagacgctttttccgaggatcggtcggaagcggtatcgggttgcgcgccgtccacccacgcttcgatggcaccgctcacatgcgcgtcaccgaatttggcgagtttccacacgctcgcctcatattgttcgacggttcccgcggacgctccagtcgcatcggcaccatccacgattctgaaatgcactgttgccagatcgccgtccagttcgccgctggctttcctgccgtattgcgttggcgtgctttcgaatggaatatacgtggcgctttccatgtcgtcgccgttccacaccttcacgccggatgcgttctcaccgacgccggagacggaacggaagttgacggtcactttggttttcgccgcatggttgcgcgtgtagggcacgcccgtctgctgccggtgcccgctgacgttgatcatagtggcgccgacctgtgccgtatattccgttccccgcttgcccccgttccagtccgtggagtcagattccccggattgtgtggatgcgaaatggtatttcaccgcgcttaggttggccccttccggcagatcggccttataccagcctgccgcattcgtggaatcggctacatcgaccgcgctcatcgcaatgctaccgctgccgttgtcggacgtgtaacgcacatacacctgcccgtcccacgattcgtcgggcttgtagtagatggtgagggttttgtcacctatcagcgaactgttcggcgaatccttgtattgcggagcgtaggtgccgctaggttccgtggtttccgtccacgcgcccttgaccgcaccggcatagatggcaatggcgcttcgtttgccgatggtcgctttggcgtgaccgccgctgacggtcacggtttgcgagcaggtgcgggaagcgtacacgttgcagtattccccgtccggcaacgatgtcgtatagtcgacgtcatgctcctgcagggtgttgttcaatgcgagcagacccttgcttttcccgttggcgtcaaccctttcgaaggcgatgtcgttggatccggattcctgccagttgcttacgctggtgccgttcacggcattatggaatttgatcatgcctcggattgacgtccaccgctgttggcagttccaatcgccatactccatctgcgttgggtccttttgcgtggagcacacgtcgtccatgctgattttcggcacggtggtgtcagtcgaatccttgacgccgtcatcatattgggtgctttcattgaatgcgtagtctgaaaggatcttcggatgcccgtagtcgtacccgagcatgaacgcgttggcgagctcgtatcgggcgccggaaacgggtttgagcgtttccgaaccgcgtgcggtatcccagttggacacgaatacggtggcattatcggcgtcgtcgagcagatcgctggtgatgttcttcaaattggtgatggatccgttgaaatccttcaacaatgagtacgcgtacgagaattcggtgacctgtccgttcttttcgtatcgttccggcgcgaatttttcggattctccattatggtagatgacttcctgcgaccatgggaagctttgttcgtccgtaatgcccgctttggtcatgaacttgcgtttgatggatgcgatgtcgttgggatccatatgttttgcggagtcgatgcggaatccgcgtacgccgtcttcccataggtgcgccaagtattcggcttggatgttttgcacgcggtcgctgccggtgttgatgtcccacatggtcgacagtcggcagttccacacttcgtcggcgttggtgtagtcggagatgttgtctgacacgttcgacttgcaggtgtggaagtcgccgctgggaaggccgtattggtggttgttgccgctttcctcatactggtagatgccgattcccgggtatcgtccgtatgatccgttgtattcggttccggccacgccatactggtcgtcaacccatgacacgtcatgtccggtggtgtggttgagcaccatgtcggccacgatttgcacgccagccgcgtcgcattggctgatcatggttttgaactcgtcttccgtaccgaaacgcgagtcgagtttgtagctgaccggctggtagacggtccaccattgcgtgccttggatggattcctgcggcggggagacctgcacgtatttcacgccttccggaccataggttttcgtgcattcgtcgccaatcgtcttccatgattgctggaatgcgatcatggtcacgtcagtggctgccggattggtcggatcgtcattgccaaaagccaccgattgcgcgctgagccccgcgagggaaagcgccaggccaagtgccgcggccgcgatgcggcgcaccgaacgcatgccggtatgtcgtgcagccgcgtgacgggccatgcggtaatccatccgattcccctgtttcgctccgtgacgcctcatcgcgcgtctccttccttgttggtcttgttacgtttggcgatgccgtagcccatgccgatcatgccgagcgccactaccgcgagaagtgtgccgtagcaccatcgttgcccgcccgtggagggaagcacgatggagatggtgttggtgatggtggagattccggtttttcggtcatcgctgatgaccggctggcagtagccgtccactccgctgatcgcttcgcccttttcgttggtttccttcaccgtgtacaccttgttttcatctaggtcggtgaacgtgtattgccagttgttgccgtcgctcaacgccaccgtcttgccggtggattggccgttcgcatacaacgtcgcatataccgctttcggacgtttgctgctgtcgccgtagtccttccacactttatgcacgctgtggctggtatgccccggcgtgtaggtgttggtcagcgtgtacgcccaggattccgcattctgaccgctttcgcttgtttcatccgccttgtcggattcgcccgactcgttggccttgccttcggcgccgtcagccgcagcgactttgcctccggtgagcgtcggcgtgtagttcttcacggcctcttcggtcaccgaatactgaatttccttgcccttgtagtatttgggcaggttcgtgaaggtgtaggtccacgtgttcgcgctcacctcttgcgaagtggtcgcttcgcttgttccgtcagccccgttgacgttggccgtggtggcctgcgtcgctttggcgttctccgaggtcagcaccatgcagctcacaccccatggattcgtgccatccgtcgcgccggtgttcttgcactcgctgttgtgttgcggtgagggccatccgggcagcgtctggttcttcgcatcggtccacacgctggaaagcacccagatcgtggccttgtcgcccggccgtttcacattgctgggcgcatcagtgtcatcccacgtcttgtccacgctcaatgtcgtggtttcgggcgtatgcgtgttggtcacatcgaacgcgcaggatttgaccgtgctcgtcaccgcacagcgtgtttccgtaccgccggcgagcgtcacgtcgcttgccgtatagccatctacggattcctcggttaccgtatacgtgtacggattgttgtacaggttctgcttgggaagaccttcgaacgtccacgattgcgtgttgctgccgttggttcgcacggtttgcaccaccaattgttcggtcacgtcttccgtttcgtcggtactgccgctcttcggctgtttgctggttccccaaatatggaaggtcagcgtcttcggccgtttgccatcgttgtcatcctgatcgttccacgttttgttcaccgtgatgcttgccgtttccggctcccgaatgttcaataccgtgaattcggcgccgtcgatgtacggacgtttgatcacggaaacgcggtattccttacctgtgagctcttgggtcagttcctcgtcaaccgtgtagttgtacctgttgccgtccgcatcatatcggggcagatcggtccacgtgtacgtccagtcgctggtgttcttgttgtccaacgtccgcgtgtacttcgcatcttgcagctgcttggagttgcgcagcaggtggaatgtcaccgatgtcggacgctccgaatagttatggtcggaccagattttgcgcacgcgcaccatggtcgtatccacgcgatcctcgacgcggatggtgttgccatccaccagcttgccgtccacgtatgcttcgccgcgggaaatggtgaagttgaccgcgttcgccttttcatacccgaccggcgccttggtttcggtgagcttgtagacgccgtcctgcagctggaattgtttcggcagtccgccgccgctggtccaggtgatctcgtcgatcgtcttgccttcgaaagttttgccggttatggagaattccgctccagccagctcggcaccgccgccgaccttggttttggagaacaggatgccgcttttgcccggcttgtctttcatgacgacggtattggaatcctgcttcttaccgtcgatggtcacgctgccgtcgagcccgacgctgaatacgatgtcatccgcggtttcatagccgtccggcgccaccttttcacgcagggtgtaggtgccgggtagcagggtgagttcgccgggttcgccgcctttgctggtccaggtgatctcgtcgatcgccttgccatccaaggtggtgccggtgatgctcatctgcgcgccgtcgatattggtgatgccactggtgagactgtttttattgacggtcacctgatgcgtccggtactggtcggtcatcacgatggtattgtcctgcacgtcggcatatgtgccatcggtttgcttgatctgcacgctgagcttgccggtgacggcgtcgctcacgactttgaattcgaccggatccgctaccagataaccatccggcgccttggtttcggtcaaggtgtaggtgccgggcttgagcttgatgctcttcgacttatcccgctcacttacccaggtctgcgttttgaattcggtgccatcattcagcgtaccggtgaggcgcatggtggcacctgcgatctccgtacccttgaggtcctgcttggagaaccacacctcctcgttttcggggtggtgcgtgttggtgatggcgaaaccttgggtttgcgagccggtgatgtgcgtggtgtagccgctcaccgtatcttcgcgtatggtatacacgatcttcttgccatcctcgtagacgggcagattggtgaacgcgctgtcgttccgccagtttccaaccgcatcgagtgtcacgctttgatcggtttcctctccgtttttcaacagatgcacggttacgctgtcagggcgcttctggtcctggttgtcggcgtcgtcccatgctttttcaacgccgatcgacgtggtttcgggcgtgtgcgtgttggtgcattgttcggtggcagccgaaccgtcggtgttgtattgcacgtcagcgcattgcgagtcgtacccgcccagcgtcgtggtttcgacggccatgtaggccgcggttttgccgtcgactttcaccggcagtcccgtccattgcacgttatcgttcttgtcgggattgagtatgcggctttgcccgtcgactttcgtataatcggcatcgccgtcggtcttgcggtacaaatcgaaggtgacggatgcacgtttgccgtcctggttgttattgtcgttccatgttttcgtaacagtcaacgacgtggttttcggtgcgtcctccgcctgcacgtgaccgatgccgtcgctaccggtcacatttttgccgtcgacggtgatggtgccgtcttcgccgaccagaatgatgatcggatccatgacttggtatccgtccggtgcgttggcttcggtcagcttgtaccgtccgggcaggagttcgagcgttttcgtctcgctgccggaggtggtccatgtccaatcggattccacctgcgacgatccgacacgagtcagctgcatggtggcaccgtcgacgggtacaccggcattcgccgcatccacctttgtgaattgcaccttgaacttcgttttgtggtcgttgctgcagttccaacggtagttgcccaatgtggtcgtcttgccgtcgctgtctttggctacggcgacgatcaatttgccgctttgcccgtctacggtaacggttttgttgtcgtatcgtccgtcgtatgcaccggcagcggtctgcgcgtcatgtccggggaatatcacatagagcggagcggatttctcgtattgcgaatcagtgctgccgggcactttgccgtccggacctgtcagctcggtgaccttatatacggtgtcgtagtccagctgcagtcggtcggacagtccgttggatgctcctgtggtcagctgcttggtgatttctttgccaaccgtaccattgcaggtgccatcggcatcggccgtagacgacacgaagttgcatccggtgacgctttccactttgaaggtggcgctgcccgccggcttgccgagatcgccgtcggtgtatttgtaaatctgcagtgtgctctggtcgtatttcataccgcctttgctctgctgcacggttccggtgatcgtgttctgcgaggttccgccgttgttctcatacccggcgagcacgattttgttgccgcccagcgatccgaagctttcgcctggtttgagctgcaccgcggccgtgtaggtgatggtgcatgcacgggcgtcgggaatggaaaacactagttcgcgggtctgcggattgtatgaccatgttgcaccgttgatggcggttccattgtcggagtccatgatcgacacgctgttggcgttgaggtcgagtgcctgacccatggtgtcggtcagagtgaggttgttgcctttgttaagcgtgtccgcattcgggttgactttgaccgtgtagttcacgttcggcgcggtcgtggcatcgtatttgccgtttttgtcaagaagtttcggcttgctcgcgcccactgtggcggaagcgtcgcctccggcgctgccatcaatgtcgatgtgcgccttgttctcataatttccccaatcaggtgcggtgatcgggtcgatgctcgtctcatacacgatgagcacaccagccgaggtcttcgcctggctgaacgccggggtacccttggctatggtgaaggtcaccgtgccgtcgccgttgtctttggcgctcactccggacagcatttttgtggtgctggaagcgtcgaagatcttcaacgatttcgcgtcgtaccgcgtgtggacgggcaacgtatcggtcaccacgatgttttcggcgtccgacatcacgtcatgcactttgatgcgccagcggatcacgcctttggagttggcggtgtagccgtacccgtattggtcccaatactggttggcgtcttccttgccgagcacgtcgccgcgatgctggtgtttcgccgtggaggttttgttcaatgccgaagctcggttccacacggtttcgtcggtcacaccgtcgttgacggtggactggtattgcacgtacaccgtagtgcctttgggcaatgatgcgaacacgatggtgaatcccctatcggtggcctctgtcgtgtatccgcccgcgtattgctgcgtcagggcggcgtcggtgtacactttaatgctgtctttcaccaaggtttgcttggatcccagatccttgccgctgtcgtccacatccagcttgtcggtcagttcggcgttggtgaggtcttccaaggctttcatgctggtcacccacgtcaggttcttcgcttcggatgccggcgacgtgcatgttttcttcagttcgaccgcgtccgtgccgagttgaggttcggccgtggctgttttgccggttccatcctgaggttttacggtgacttcgttcttgtatttctggtgttcgccgcttccttcgaccggcacgtttttcgcttcggtccaatactggatttggaaatggtcgtagccgccggagggcagggtcacggtgcctgctacgagatcgctccagctaagtttgatgtaatgctgcggattgtacgggtcgtcgtccgtatatgcgccgggcgagccggtcggacacacggatttccagtcgccgctgttgtagcagctgagcaccagatctccggtcggttccttgaggttgttcttgtcgagcagatctttgacggtggctccgtcgacggattggccttcgccagcgccgatggtgatgttccaagtgaagccttgcgtgccattttcgtcttttgctgcggttgcgcttttgttcacataccagtcgctgtagttgaaccagatggagttgctggtttccttcttgttgacgtcttcgttgctggagtaggtcaccttgtttttgttttcggtgacattgctgcaattgccggcctcgcggcatgccttgatgacgctgtctttgtcggcgttcaccgagtagcgcacgtatagtttctcaccgtcgcccatggagccgatggtgacgttgaaattatggtcgtcggttttggaggattgccatgcgcccgtgtattcgttcttgcagtcggcgtcggtgtagatgtgcacggatccgtccacgaaggtcagcaggccgcccatggtgtcgtccatggtcacgccggtgttcgtgcctgtagaggtcacttccaaaacgaaatcgtaggtggatgcgtcggaagtggagattgccgggcgtttgaccacgttgacgctgtgtttgccctccacgttcacggtgatggtgccatatccggggaaggtaaagctggtatcgccgccagccgaaccaccggttttgttcgaggtgatggttccgtcagtggtcacgaacgcttcgatgttggaccccgccgattcgccgcgggtgtaggtggccaccattttgtcgccgtcgatggtgtagtagccgaccacgtcgccaccgttgtagatcgggtatttctcgttcgatttgtattccagattgctgggaaggtcgtagacgaaggtgtcgccctcgttgattttgacgtcgttcggcactttccaatgcagttcggtgcggatctgatcaccgtagttgacttgcatgccggaaatgtacggcttccacgtcttgcctccgtcggaactgatttcgaaggaggtgtcgtccttgtcaacccaaccgagatcgctgatattgtattcctcagcatacgcatgaacgggcccgatcaatacgcatgccagcatggtcgccaatgtcaccagcatggcggcaaacgttttcatatagcgctttgacgtcagctccttgcgcctatgcataatccctcgcttcacgattaagcacaacctaaggtggcggcagccactaccttgccccagctaccgccacttttatgtaatcacggtgacacgacatcaacatcaacgaatgaaacacaaaatttgtgatcattttgttgcaaaaacacgccgaaaagtgttgcatcaaacgtttgacaatgaggttacccccaccgaagcgaaaacaagaatcgccgaaaaagtcttgcaacagattatgcaaattttctgaaacagaagccacttttgcaattgtttgcaaaagtggctccgccatactttctcacccgaacacgggatcaactggtgacgcccatcaccgacaggcaccaggcgttctcataggagacttcctcccattgcttgtaccgcccggacgtacccccatggccggcttccacctcgattttcgccacggcgtccacaccggcatgctgcagccgggccagccatttcatcggctccacatacagcacgcggatgtcgttcatggatgtggtaatgaaaattttcggaaaaacggcagttctttcgtcattttcactatctggcgcattctcgtatggcgtgtacgacttcatatacgcgtacacatccgcgtcgtgcagcggatcgccccactcgtcccattcggtgacggtcagcggcagcgaaggatcaaggatcgaggtcagcgcgtccacgaacggcacatccgcctccacgcccgcatagcattccggagccatgttggcgaccgcccccatcaataggccgcccgccgagccgccgttcgccaccgtacgcagcggcgaggccagtccggcgcgttgcagcgcgcgcgtggcgtcgatgaagtcctcgaacgaatgcttcttgttgagcagatgcccctgctcgtaccaggcgcgtcccatttcgccgccgccgcggatgtgcggcacggcgtacagcacgccgcggtcgagcatgctgatgcgtgacaccgcgaatcccggatcggaactgatctcgtacgcgccgtagccggtgatgaacatggcggaatcgcaagtcggcacgtcacgtcgccataccagcgagacggggatgcgttcgccgtcgcgcgcggtgacccacacccggcgttccatgtagtcgcgcggatcgaaaccacccagcacggtggcgcatttgagcagacggtcctcgccggtgtccggatcgtaatcgtgcagttcgccggggcgcgtgtagctggcgaacgagtagcgcatgcgcggcgcgtcatacgaggggttgccacccacgccgatcgaatacaggcggcgcgtctcccccggcatgcggtcggcggtggcgccgtccgacgacgtcatcgcccgacgcgagacgccatgcacggccgatcccttgccttgcgcggcggcggccgcgtccagtttgccccagatctcggcgcgttcctcgttgatctcgtccacggattcgtcgacgtcccaatcgtcctccagcgcgtgcggcaccagttcggtgaaccgccatggccggccggccaggaaatcctcggcggcggcccgtttcgtcatcaccgcgatgtgcggcaggctttccgcgcggtactgcaatgcgacgaaatgccgatggatcgagataccctcgatgcccaagccgtgcgcgccctgcagaatggcgggattgcagggatttgaatacggggtgccgatcggcatggaggagacgcccggctccacgtcgtcgccctgctcgcagccgtagggcgagccgaccgccacgcgcacgccttcgcccagccggtatggaggctcgtgcgtccgcatatcgatcacatcgatctcgaaattcggattcaacgcgttgtggtacaccacggcgagcggaatatcctcgccatgctcccccgcgccttcgaagcaggcgaagctcacatcgtattccacgtcggtttcgcgcggaatgaacgcccggaacgagccctctggggtgtccaccggcagcatcagcacctcggtggtggttttcgacccggtgccgatcacgatgttccgttcgtcgaaggacagtccgatgcccacccagaagcgttcatccgcctcgcggtacacctccacgtcatcggtcacgggggtgccgacgcggtggcgcatcaccgcgtatggacgccacgcgtcgtccaacagcacatagaacacccattgcgcgtccggcgtgaagcaggctccgccgatgccttcgaaccgctcctccagctcgtcgccggtctcaagatcacggatgcggaaatcgtagcgttcgtcgccagtcgtgtcggtgccgtacagcatccaacggccgtccttggaaatgtccatgccgccgatgcggaagaaatcgtggccttgcgcctcggcgttcgtatcgaacaccacctgttcgccgtcgagtggcacgccggcctccactgtcggcggatcccaatcgtccgcgccgcggatcggcacgcggcattgcgtggcgtattgccgcccctgcatggtgcgggtgaagtaccagtagccgtccatgcgcgtcggcacggacatgtcggtttcctgcacatgcgacttgaattcctcgaacaacgttttgcgcaacgatgcgagcggtgccatgcgctgttcgcagtagcggttctccgccgccacatagtcgcgcacatcctgcgatcccttgtcgcgcagccattcgtagttatcgatgaacgtatcgccgtggaaggtgcgctcctttggcacccgcttcgcttccggcaccgccagtccattctggtgttcgtcgtgcgcgttcgtcgcttccttcacgttcatggtgttttccataccccgaaattcactcatgcacgcgattatactgacgacccacccaaacttgtgtcggccgtcagtcgccgttttgcacggcgcgcaggtacggcagcatggttttcatgatgttcgatccggtcgttcccgtgaataccggcacgtcggtgaccggcatcggctgcgtggccacgcgcccggcgacggaaccgaaattgccggtcacttcgcgcggggacagctgccggatgccgatcgccagcacacgccccgggtagcggcgtgcgattgtggcgtatgtggtcggatccttctgcccgtcgtcgccgatcagaatgaacttcatatcgggaaaatcggccatgagctgttcggcgtattcaagcttatgctgcacacccgacggaatgaaggttttcggcctcgggtcaaggtcgcgcagcagcagcggaccttccggaaaaccgtggttcgtaatgaaatggcggatcgagctttccacattccatggcgaagtggacaggtagaagaacggcgcgtccgggaacatgtccgcgatgcggttgaacagcaggttcatgctggccaccggcacttttttgcgcggattaagcagcagcagattgtaggcggccttcatcagacgcggcgcctgcgtgaccatgatggtgtcgtccacgtcggagatcacgcccactttggtgccgctgggaatggtgaaaagattggcgttgaccggcttgcggctacgcactttgtacgagacgttgtggatgcccggttcgagcgaatgctcggcgacgaggtcgaggtagccggcatcgtcggatgccgcgaattcgctggaaatatcaggattgctgtcgatcgcgtcgtatacttccgacgcacccacctgcactgtttcgatgggcacgtcatcgatggcgatccgcactttggtatgcggggacggcaccatcagcatgccacggatgccgcgaatcaggcggccggcctgccgtttgaacgggccgtatacggtacggcagatcagtcgggagtaatgttcggtgccgtagccgacgtagggttcgacacatggataccagtcgagcgaccgtaccaatgcggtcgagaatttcagccagacactgaatgctttggtgatcgtgcggcggaacagcctggtcagcggcggtttgacttcaagacgctcatgtctggaggccgcgtcgaaggtggtgaccaccttgcgtgccggaatcggcacggtgggcatgtcatcgcaagaatcgtccatccgctcccccatacgctgctgttcgcgctgctggtcgtgctgcggcgcacgctgcggcgggaactgcggcaacggctgaatttcactcatatgcccactatagaggtcgcgttcgaacaaacagtaacgccaccgagaaaatcagggaactttcagggccccgcaaggcacttcccataaaaaggctgcggccggcgggtacgatgcgcgaccgtaagcccggccgaacggccttgagtgtgccgcgcatcgcacccgccggccgcagccgtaattaaaactagacgtccgtgctattcagtcagccacaatcttggcatactcgtcagcgctaagcaggtcaggctcgtcatcctcaagctcgatcttgaaaatccagccctcgccgtacggatcgtccgtcacaatgctcggatcgtccgcagcctcgttgttgacgtagcggatggtgccagccaccggcgagaccagcgcggtgaccgccttggaggattcgaattccgccacttcgtcgccagcttcgacctgcgtgccgacttcaggcaaatcgatgtacacgagttcgccgaactgttcggtggcgtattcggtgacgcccaccatggcgggttcaacggaggaatccacccacacgtgctcgtcggagtattcgaggtgctcgggcacgtcgaggttcactttgctatcgtttgcttcgctcatgccgcccattgtacggcgtatgcgaacgccgcgcacccgcgccacgcgtaacgggtcagcgcaccggtccggatggcatggcgccgactacctgcacgatggtgccttccgggcagttgtcgtagatccacttggaatcggcttcgtacatgttcacgcagccgtgggagccgtagtgcgccgggtcgccgtgggcgatgccgtaattgttccagcttgccgtgtggaagccttcgccgccgtagaagtagcttacccacttcacacccttggacaggtagcgcgagccgtcgtcgttcaggccggtcatgtcctggatctgatacttgaggtagatgtagaaggtgcccaggtcggtttcgtgcttgccggtggtgcccgtgcacaccgggaaggtcttgacggcctcgtcgttgtggtacacggtggcggtttgcgcggtgcggtccaccacgatgcggtattcgctcttcttctgcacggttttgaagttctgcacgtcgccgtccaccggaatggtggcgccttggccgtttttgagcgcttcgccgatcttcggtgcgagcgcctccatgttcttgaccttcacgccgttcacgcctttgacgatggtggccagcactttgccgctgttgtcgacggcgtcttcctggtcgaccgcgtcctggttgagctgggctgggacctgctgctgcacgtagttggtgatggcgttgtcatcgtaggacagcgaaagcgtgccgtgttcgaggtcggcgtcggttttcagccatgaggccacgacttcggctggaatctggaaggtcttgccttgtccgttgtccagcacaattggcgcattcagtcgcgcgtttgcctggtcggccacgttttgggcttcaggcagtgcgaccggcacgtcgatggtttcgtacgtaatcgtcacgctgccgctgtgccccgggttcgcgatggctttggcgaccgtgtcgatcacgttgtccaccttcggggacctgccgccgcggccttccactgcgacgaaggcgtgcgcgttgacatcgtacgatgcggtggacggtaccgcgcggtcggtgtcctgcacgaatttgtcggtgacgaacgttctgagggccagcttgttggatttggcgttcagcggcacgttcttcttgacgaacgggttgacttcgttgatgtattcgagtgcgccgttggtctggtgcttagcggcgagcagttccgtgaccgtcttgtcgacgttgtagctcacgccgaggtcgctcaggctgccggaagcgctgttgccgttgccgtccttgatgttcacggtggtgttcttcacggcggccgtcaccgtgtttttcagctggtcggcggtctgtccagccacgctggttccgccgaaggtcacgcccggcgcggccttgtcttggaagtaccagcgtgcggtgaagaagccggcgatcgcggcgaccaccagtacggcgagcacgattccggtgataatcagtggcagtttgcgtttcttggccacgacggcttctccttcgaccggcatggtgagcacgggaatggcgggagcgggcgtggatgagggcatgtcaccggtaggaatggcaccagtgggaacagctccgttggggacagttccggcaggcgtggtttcggcggcaccggccgtcgggaatgactggaacggctgggtctggtccgatgcgaaattcaacggcggcatggtctcggtggcggcgttggacacgtcatcctgttcggacacatcggccacgtcggcgagattgatcgtatcgccgttctcaccagactgcggcggcacggcattcaccccttcaaacgagatgccggcgaagctgttgcccgtatcgttctgcccacttctatcagacatgtatgtggtttcctcattcactctcttaacggtacataccatgcagcatgatacgcagacgagtgcccaaacgaatacctaaacaagctcccccggcaaccgccccgaagacaggctcagccgataccaccttttaatggcaggtcttgtcacggcaggtcgtggccgagccattcctcaatcatgtagcgtgcgatcgtggctttgcccggagcctccatacgtcccgaaaccagttcgctcatgtattcatcgcgtgtgacccaacgcgcctgcaacgtttcctcgccgtccacgtgcacgtcggtggtgaccgccacgcctttgaacgccatcatgagagacgaggggaacggccacggctgggagccgaggtatttgagttcgcctatttcgatgccgacttcctctttggcttcgcgccggcatgcgtgctccaggttttcgccagcctccacgaatccggccgaaaccgagtacaggccgttgttgcgccacgcgctgttgtgctgcagcagcagacggtcatcatggtcgacgatcgcggtgatcaccgctggctcgattcgggggaacagcaaacgattgccatcctcgtcgttcgtgcagtgctgagcccagccgccgagcgccggttcgacgggcgcgccgcacgtcgggcagtgacgctgccgggcgtgccacatgctgagcgagatggcggaggttgcctgtccggcttcgcgtgcgctggcgtggggcgcgaatccgcgcaggtccacccagtcgaatcgggttgccgcgctttccagcagcgatttcgcgttttcctgcgattcatgcgccggcacttcggcgaacgcgtcgtccgctcccccgctgcgagccgtcgcagccgtaatcgtcgtatcgttcggctggacgtgcgtcacgtccacggcgacgacgtgctcgcccaatcgtccgccgtacgagccgaggaatatcgcgagcgccgatgggtgcgattcgagttccgcggcaacgtacgcgcccggcagttgggcgaggcgcattttcacgttggcgtagtcggcgatggcgccttggccgtgcggcacggccactttgccgtctttgacgaggatgactttcgttgccggttccgccaggactttggcgaacaggtcgggttcgccgcgtcgtgccacttcgtagtcgatgtctccttgggcgagtggcaggaacggcagggtctgcgtcaatgccagtggtgagaacacgctcatggttgtgttgcctctttcatgcgtgttatatacggaatatattcgttatacatacgtagtacatatttcgtatatacgttttatatattttctctatatcttgtcgatacgccggatggtctgccacagataatcgtcgcagccggctcagccgactcgcttcaccagttccagcaacgcggcggccacctggtcggggtgttcgtacgcgctgaagtggccgcagtcgtcgatcaccgtcatcgtcacgtcggttttcgtcatcgcgtcggcgaccggcttcatcactgccggcgggctggacgggtccttgtcgccgcagattactgcgactggcacgttgatgttcggcagcacgtcgttcaggtcgggacggccagcggccatgcgttcgcgccaggcgatgccgtcggcgggctgttcgttgatccacgtttcgaactgcctgcagtaggcgtccgactgtttcacggtggagtcggcttccgacggcacggcgaatcccatgaccggctcgtgtgtgccggtcgtttcgcagtcggtggcgattgcgacgcgcttcaatcgcatgtcggcggagtcggcgtcggctttcgtgtcgcacagggcgagcgccgccaccgcttccggatgcaggcgttggatgtcgagaatcaggtagccgcccatcgacaggcccacccagatggctttgctgtagccggcggcgtgcagcaggtccacgtacgcgtccgccatgcggtccagtccgtatgggaacgcgccgtcggcgtccttgccgccgctgtcttcgtcggacggaatcggcccttcgccggcgccgggcatgtccggagcccagatcgcaaatggtttcacgccttgtttcacagcttggtcgcgtaaagccgccgcgcactcgtcccacatgcggtggtccaccgggaagccgtgcacgagcaccaccggcgtggtttcggtatcgttgccgccgtccgtatatatgttgttgttcagttcaatcgccatatttttttctaatcctcccctatctgcctgttcgcctagtttgcttggcttttgccccgcttgcgcggcttgtcctacttgccggtccatgcgagcgcctgccgcacgatggtgccgtaaccattggccatctgcccgacgaaggtgtcgagcatgtctccggacgggtcgacccattccacatcgagcgtctcgtcctgcggcttgcaatcgccggcgatcggcaccacgtagcacagcgcgatcgcatgttggcgtggatcgtaatagtcggacaggccgggtgtcgggaagaattcggccacggtgaacggctgcaggctgatcggcagctgcggcagggcgatatcgcccaaatcttttgcgacgttgcgcgccaccgcttcacgcaacgattcgtgatagagcacacgtccggcgatcaatgtgcgttcgataccgccgtcgtcggtgacgcgcagcagcgagccgatttgcgccaccctgccgagatcgtcggtgcgcaccggcacgaccacgacgtacggaatcggtatttcgtggcgcatgcggttgatttcgtccgatgggagccatcccggagggttgcccattccgcggatgaaatcctccggcgtaatgtcgtcgaattccccgcgatggcggttggcgtcgaaatcgccctcgtcgggcacttcatcattcatcactggcatggttccattatcacgcacggcatgtgaatgtcacgtgcttccgattcttcccatagcgcaatcgggtgcggcagtgtgtttgcgtggcgtgcggctatatacttttcgcaaacggtctttcgcaatattgcgcagcattgcacgatattgtttttgaaatcggcttatagcgtaagccggggaatggggaacgcatatggcaacgcatgcagtcacttcgcaggatttcaaccaggtcgtcgaatccaatgatctggtgttcgtggatttctgggccacgtggtgcggtccgtgccgtgcattcggcccaacgttcgagaaggcaagcgaggcgaatccggacgtctatttcgcgaaggtggatatcgatcagaatcccgatctggccgccgcggccaaggttcaggcagtgccgacgctgatggtcgtcaagaagcagcagatcatcttccaacaggccggcgcgttgcgcgcttccgatttggatgatctgatcagccaggccaaggcgttggatatggatgcggccgcttccgatggggacaccgcttccagcggagacgccaaagtgaaaacgccaagtagtcagtcggaacgatgattcggcccgtcgcctgcgcgttgcatacgttatcttcaagttccttggggtgcggtagactatatgcagttgcgcgcattccggcggaaccctagcggttgtgcgccgtgccctaggcacggaatccgccgaggaattgtacccgatgtaggagcagaatggctagccataagaaacatgcccaaccaactacgtttgccttgccgggcaaatctcagatggtgaagattgtcgcaacggttgcggcagtggggctgttggccactggcggcatcgtgtcgcataatctgtacgccaccgcggagaagtctcctgccaagcaggtcaccgcgtattccgtcaccgacagcatcgaagcctcccgtggcaacgcccgtgaggcgctttccggagatacttcgtacgtcaccgtgaagatcaacggcaagacccgcgtggttcccggcatgcatttcaccgacgtgaagtccgtgcttgacgcgggcgacatcacccttgatacggaagacaccgtttccccgtctttggatacgaaggtgaacgagaacaccgtcatcaagatcgaacgtgccggcgcttccgttgaggtgtctgatacggatatcgcattcaacacggtcaagaaggagacctccagcctgccgaagggccaggagaaggtcgagaccgaaggcgcgaacggtgttatggagaccacgaacctcgtcaccaagtccggcggcaaggtcatgtcttccaatatgatcagctctttcgtgaagaaggctccgaccgacaaggtgatcctcgtcggcaccggctcctcgtccacgccgtccgcggccgcagcgtcgatcggcaccaccgtgccggctggcgaaatgcagcagtgggctcacgattatctgctgtccagcggctattccgaggccgatttcaccgccaccgtgtacatcatttctcatgagtccggttggaatgtcgcagccacgaacccaagctccggcgcgtacggtctgccgcaggcgctgcccggttcgaagatggtgagcgccggtgccgattgggccaccaactaccagacccagcttaagtggttctggggctactgcgcacagcgctacggctccatccagggcgcctacacctactggctcgccaaccactgctactgagttttagtttttcagacaggagaggctccgcacacattgtgcggagcctcttctgtcttatacacctcttttatatttcatatggaaagatgcaggccattcatggcgttacggttgtttatgcacgcaattcattcatcgcttttatcgcggcccttttggccatcttacgcgtgagcgaacggccagacgcaacgggctcgaaaaagccgtcatgctctttttccaccgtccatcgccaaccaagcacgttattttgagcgactcgaatactgaacgaagatcctacacgcccgttacctgccacattcattccaagctccctttttcaggatttttgggctggatgcatacgtactcattattagcgtttatggacgattcgcacagcctatcaagatactgcatatagtacagcactcacatcaagagaactgtactatatgcgatttttcaagctgagcggaatattgttcacttactcgccatctttggccgtatgatgcgaacctttgcggggaccgcgcttgccggatacaccctttgaggcatcggccacagcaaaaatgacaaccttctcatccgggtaggactcgccatccatggcgaaataggcgatctggtcgtctgcgaccggcgggaaagtgaaatacttctgcaccgctaccagcacatcggtggtacgcacggtcacggaagaagcctttcctgcagcgtcagagtcgacgccatcggccttgcttcgcttggtcttgcagaacttgatggcgttctcgtctttggcgtcgcatgcctggactgcgatcttcttctgcttgtcattcaccagcaatttcacgtatgccgggcatccgagcgcttcggtcacgcctttggaaaagcgaacggatgattccatgaccgtcatggtcatcttattggtggtggtcttttctcccactgcttcaaatccgttaagaacagacatgccaaccccttgaaaatataggatattaattacatgcaatataatacaacaattcgcataaatacacccttttttcactaataaaatagggggtatctccgctttccagcagaaataccccctgtatttccaagaatatagcaataattcatagacttcattgaacaagttttcattgagatgaactcaaggaaatcatgcaccaataatgtcgagaattaccgcgccatatttcaatagttgtatttcacatcattggtcattttgccacacggcgtctgatcgagcttcatatcagccgtggccttgtcagacacggtcacgtcgaactcgtacgtcacgctcttgccaggtgcgatgtacgccatactggagttcaatggcttgccgtccatggtggcattgctacggtcacgcacatcaccggtcacggcgattgatccaatcgaaccacctgcaggcgcgtaaatcagcacacgctgcgcggatgtgccactcggcgccacgggcacgccaccaacgcccttctgctcaccaccgagaatgtaactcgtgcaggcagccatttccgtggaagtcatacggttggtcagcgtgtacttcacgtggtaggtcttgtcacctgtcttggtcacttcgctgctacggtcgatataccaacccatcttcgaaggattctgctcgctgatgtaaatgcccgtttccggattggtttcgctttcaggcgcattcttggcgagtccagcaccttggaagtacttcgcttcgtcatcgtggaacgtgtaggcgtagaagtggcgcttctcggccaaatcaccgatgctttgcgccaccttcatcatcttgtccacagtcatgttgccaaaagcgccgtccatcaccgttttggcaatgtactcgaagtattcgtcctgctgtgccacaggaacgtccttgtagatggtgttgagcatgtattcggcggtgttctcgccggtaagcacagtgccgttggacaaggtgactggtccgttgatctccaccatcttctggatgaacaccggatccacggaaatcaaaccgtcgatgttgcaggcatattgcgaacgctgccatgaagcgttgagcatttccgcgttgcgggaaacatccggcaccgcgaaggtgtctcgcacgtcgaaggagaaacccaacggcctgttgaataccgcatgttcctcagcggtgccgttgttgccattgacgaattcaccattcgggtggaagtcccccaccgcgattttgccatgatccgcagtcatggtgccgagagagccaaccaagccgccgccggaacgtgtttcggatgtggtctgtgccgccagcaagtatgtgcgggcaccgttctggccgaggaaggaaggcagcatgtgagtggcgttgctgacctgcccgaccagatcggcgatattgtcaagctggtccttgccctgctgataggctttcttcaccatgccgattttcggctcggcaagactgttatactgcttgttctgctgctgcacctgctggttgagcttgtcgaagttgccttgcgcatcggtgattggctgcaggttgagttgcccttccgcaccggaaagattggccccggcaagctgctgcaccgcagtggtcaacgatggcagcgtctgctgtgcaagattgtccacgacttccgtcatgccttgcacagtggcgatgtcactgccgacgaacggcattttcgcggccacgttccatagtgaaccgtgcgcaatctgcttggcctgcgccgtctgctgctgagcctgcgcgatggacgcctgcgacgcggcggcatccttgagctttgcagggtcattgattgcggatagtgaggatatggcttgcgattcgtgcgccttgacgctttttgcctgcttatacagttgcataccaaacactgcagcaatggcaagtagcacgatcagcaccgcaagtacaataagcgtcacattccgtgccgtatgtttttcccgtattgcttgagcatgttgccccatgctttgctcctcaaatcattaagcactcaatttgactattccagcgcattattgtgccacatggcaccccttttttcggccgccaaatgaaatttccctctgttccatcacaagaacagagggaacatcacagaaaacccacttattggctcagtacgatccacggccagtgaagattaccatcacggttttggcaagaatcgcaagatctccagcgatggaccaattctcaatgtaggagacgtccaaatattcgctttgctcctgtgaaagatcggaccggccggacacctgccatggaccggtgatgcccggcttgaccagcagtcgggcggaatatagggaaccatagcgggccacttcttccggcaatgccgggcgcggaccgaccagagacatatcgcccttgagcacgttgtagaactgcgggaactcatccaaagaagtcttacggatgaagtgacctaccttggtgatacgcggatcatctttcattttgaagatgaaccggtcttcctgcccagtttcctcagcgagtttcttcttcagctcctcagcattggtgaccatggaacggaatttatacattttgaacggcttgccgtgcagtccgatacgggtctgagagaagaacaccggaccgccatcatcaagcttgatggcgatggcgacgccgagaagaatcggagaggaaataatcagcgcgcacagtgagccgatgatgtccagcaaacgcttgattacgttcgcagctcccgtgtactgcggcagggaagccaacagaaccggctgttccgtggtgtttcgcagatacaaacggtgaccgctcacatccgccagggagaccgccaaggcaagttccatacccagcgactccaccgcaagagaaagaccatgcagcatttcggaatcacgcgaaagcacgtcagccacatagacttcctgtacaccaaggctttcgcaaatacgtgggaatgccgagttgaaaggaatcaccttgagtttgctggagccttcgatattggcatccggtgtgtatgaggtaaccacataagcgtcttttgaagctggatccgcttcaattggacatacagcaactggttcgtacccccaattcatgcagttgcgcatggtctgcaaggctttgttgatgccatcggaagatccgatgaccaccgttctgtacttgcaagagcctttgctgcggtgacgatgcaacgcttgacgcatctgccagcgtgcgatgatgtccaagaagaaggcgatgactggcgcgataatcaacgcagtgcggggcaatgcaagtttgaaaataaatgcaaggctgcagtatgagatgatggtcagcaacgacgcattgatgattttggcatacagctcatagccgtccgccataacatggcggtggtatgtgcccgcgaatgccaagcacagcaaccaaatcaggctgaacagaatgaggaaaagccaaaacggcatcacatcgccgatggcatcgaaagcagcaccgttgattacaaggctgacggtcaacgaaagcagcatcactgccaaatcgatggcgatcaggctggcgacgaaggcgaaacgccaccggggagtcgattcagccttgccgcgcctatgtccttccttttccgcaggaaacggggtattggaaaaagtcatcggctcgaactgcttttgcagacgctgattctgcatggacgcgtatgcctgtcgatgcgcattggacgagacgatatgaatctcttgagtcctcataccttgctcgccgtttggtgcgtcggattcaccggtattcacgccttgcatgtatctccctccccttcagctgcatacggcaaacaatttaccacagcccccccccccagaaattaagagggacctatgggggtaccattcgctatatccaaatccttctccagtatggcttattcgccagcagtacctgtatctgaatcgccgttgccgttgccggtcgaaccaccattaccgtcattcgaatcgccgttaccgccgccgtttgaatcgccgttgccgttgccggtcgaaccaccattaccgtcattcgaatcgccgttaccgccgccgttcgagtcgccattaccaccggttgaaccgccattgttattgccgccgctcgaaccgccgttaccaccgttcgaaccgccatcgttcacaccgtttccagagcccggaccaaattgccacgtatacgtgtagcgccggttcgtagtgccgttattggtattcgaattggtattcgactgggcattggccgcagtttgctccgccacagacttgtttacgccgtcagaagtcgaggaaatcaccttcgaagcgttctgcatggccgtaacatcggtgcttttgccatcgaggagtttctgggcagcgtcaatcgccttggcaagcgcgtcacgtgtcgactcgtccgcgacctggcctgcagaaccgtcaagcaacgtctttgcgtcagcaatggtcttctgcaacgcggcagtcgtcttattcacttccaaagctcgcttgctggcgtacacagctgtggctgctgcggtaacggccttggtctgttctttgatattgctgatctgcttgctcatgctacgggcgtgcgcacgcagtgtggtttcggacagcagcaccgagcatccgccgaccgtcttgaggttttgcgccttggtcacggcctgagtgagctggtcgattgtggcggcatccgccacctggtttgccgcagtgccctgcagactagttgcttgttcgatggcgttttgcagtttttcgttggctttggagtatttggatttcgccttctcacataccaccactgccgcacgctgttctttcgaattgatacgattgcgtaccacgatgacgccggcgatagcaaccgccactgccgcaatcgcagcgacaatggcaataatcttccacttgtccgcagatggctctttcggcgcgaccggaatggttttcaacggatcatgttccggatcttccgcggccagctcctctaggtccgttatgccatccgaagtgtcaaaggcctgagtcgcttcggcgtcctgttcatctgtcgaagagacgaggggcggcagagtggcggtttcctcggcatcggccggtgcaaccgcatcatcgaaatcgacggtatcgagcggcatactgggtatatccgcgattgttggcgcagccgaaaccggctgttccgtttgcgcaggtacggaggaagcgatggtgcggggctcagcaagcggggtctcatccgcaccatcggcttcttccgaatcggtaggctgcaatttggggaaggtcagcggaggaatatcccagctggtgtccaccacatcccgagatatgttggacaaaataccgttcatagaccgggaattatcgttctcagttgccatacacccctcattccgtgaagaagggaaccatcagtgccgcttcttccccttcgcgcgatggctgctgcgcggcgcaccatcctcatagtaatagtaataattggaatgcgtattggtcttcttcggatctgcacgattgaagatgaagccaagcaccggcacctgcgcggtggcgagcgtgtcggccgcctcctgcagggacttcttctcgcacacgttgcggctgaccaccagcagaaggcccttggcccaacggccgaataccgcgccatcgttggacaccgtcaacggggcggtatcaataatcacgtaatcgtattgggtgagcgcctgctccaccatgagcttcatggtttcggagctcagcagcacgccagcgttcgccggcctcttgccgccaggcagaatgtgcaggttcggcttccagtagctctgcaccacgtccttcgggcccatctgtccggacagcacgtgcgccagaccggcggcaccttcaatgcccaagtggtgagcaacggacgggtggcggagatcagcgtcgataagcagtactttcgcaccatcttcagcaagggccaccgcagtgttgatagccatggtggtcttgccttcggacggctgcgcagacgtgatgacaagcagctggcccacgccttcggtgcggtcggtctgcaggaagtcgatattcgtgtgaatacggcggaattcctcggcaatagcgccgttaggctggctcaccagcaccggacgcttatcatcaagcgaagcgtccatcggaacggagccaagagaagatgctcgaacgatgctacgcacatcggaagtctcttcaaccttagtgttgaggaggtccttgatgagtgcggcgaacacgccgatgatgatgccgagcaccacaccgacagccaaatacagggcagtcttcggcgaagacttagacgtcgggacctgtgccttctgcacgatggaaagcttcaccggggacttatctccggagtacaggtcgctttcaatgacgttcttcagcgattcggcaacggaattggcgatgtccgcggcctgcttcggatctccatccaccacggcaatgttaacgaatgcggtgttagtcggattggtgacggtgacctggccggcaagatccgtcacggtttcatccaagccaagatcatcaataaccggcttgagcaccttcgaagtggtggcaagcgtcgggtatgaagtgatctggttggaaatgtagctgccgccagcggactgctggttaatgtcgacaccattttgagaagcattgtaagtagccatggtctgagccgtagccgtatacttcgccggagcgaggaaggtataggcgctcacgcctgccaccaccaccacgaatgcgatgatcgcggtgaccagatgcttacgaatgattttgaacagatccatcagagtgatgccgtcatccgcttcctcaactaccccttgcagtgcggtaggctgctgcacattagcgttctctacagaagtcactgaacttccccatctcacgttgacaatatcctttccaaggataatcttccccctcgaactattcgggccctaccgggagaacgacaaggcaagctggaagaatacgctgtcccgtcagcaaggcgtgtatgtaattaccaataccgataacgggaaactgtatgtgggaagcgccaccggaaggaacggcatataccagcgtttgcaggactacatccgcgatggtcacggaaacgatacggggctgattgccattgtgaaacagcacgggttggagtacgtgcagacgcatttccgctacacgcttctggaacattacgacttcaccgtgcctaaagacgttgtgctcgccagggaatcctattggaaggaggctctggatacgcgcaagcatgggtataacggtaactagatatctccaatacggcaacaataagcacaatgaaaccaccgcctttagcagaaaattgcaaaatgagtgtatttctgaatataatcttagtatcaaaggagcaaaatatacttacgaggcaacccgatgctgattgattttagtttttcgaacttcaggagtttccgagacgagcagtctttctccatgactcgcgaaaaacggttcatggaatctgatgagtctctccattctccaatcgcagccatatacggcgccaatgcatcgggaaagtccaattttctgaaggcattgcgcgctatgcgcaacatggtggtaaatagctacagccaaggggatgcaagcagtcctattcccagggaaccttttctgttacgaaaggatcctttctcgcattcgtccatgttcttccttgcattcatcgcgaacgatggactgaaataccagtattggttccgctatgacaatgaacggattcttgaggaagatctcatcttcttcaaaaaactgcaaggacgtttttccacgcactcctctctgctgttttcccgttcctcaacggatggggtgaaattcggtccttccttcaaaggacctcgctcacaagtacgcaagaccatagaactcaggccgaatgcacttctgctttccgcagccgcagctgccggtattgagtccattcggccggcattttcattcttccaaagtggcatagcctattacgaagcaagcgctttcgaacaggagcagcctacgctgttggatgagttcaagaaagagacaccgctttcgaaacatctggccacattgattaggtatgcagacttcggcatcagtgacgtgaaaagcgttcctgtggacgtcccaccggatctctgggctcagttcaaggaagagatgcataagcaactcggcatggatgagaacaaagtggatgagacattcaatgtcaagaacgcttcccagctgatgttcactcataccggcgaatcatcttccgcaggattcggtcctgatgatgagtccaggggcaccgttgctgcgctgtcattcttctcgcttgctcttcgccagctgtcgaagcagtcggtgacgcttatcgacgagatcgataccagtctgcatccggctctggtgaaggagctggtggcgctgtatgccgacgcggaaacgaatcctcacggttcccagcttattttcacgactcatgacgtgtcgctgatcaatcagtccggttcggcaaagcgtttactggcaccagatcagatctggcttgtggaaaagaacaaggaaggcgtttcggaattgttcccggtgaccaatctgggtattcggaatatggaaaacatcggcaagaactatctcaacggcgtgtacggcgccataccacggcctgattttcataccgctttcgcccagatcgtgaatgtggttgatgcctgatgtcgaaaaagcgaaacgttcctgcacatggacgtaaagccgcacggtcgcgccgaccgcgcaagagacgctttcttgtcgtggccggcggagcagtcactgagaaacagtatttcaagcagcttgagtccctatacgatgtcatcattgactatcaacagaagaacaacagccctaagcagctcgcgaagctcgctgttaagttgaagagggaagacaagcgagatacttctacagattgttatgaacgaatctgggtggtggtcgatgttgacgattttcacgaccacggcgaagcagcgagaatctgcaatgacaatggaatcgaactcatcatttccaatccttgcttcgaggtctggctgctcgactatgtgacggcttgcccgtcaagctatacactgacacctgatgtcgagtcagctgcagcagaagctaaagttgtcggcggaaaccgtaacaaatacatcaacaccgagctcattgacaaagaacatctcgatgccgccatacgcaatgcagcccggcacaatacaacggaaaaccgccaggggcgtaacagactcgcgcctaatcatgagcaggaatacgccccttggaccgatatgccaaaagtaatcgaaacgctgaaatctaataaacagagctgaaaggagaaacatggctctacccatccgggtaaatttcgaaaaccccttcatagatattcacactggacgaggtcaaggtagctgcacattcgcaaatggattcgactgcatctgttcatgcgcaggtatcgcacacgcccaattactcagaatggtccttactctcgaaaacagtaagaaactacctgacaaatataagaaggctcttgctgataaaatccaaactgtccaagcccatattgtcgatattccacacgataaagcaacggcaatcatccatgcgcagagacaacctgagcgcgtgttctttctttgcgaggatataactcatcccataattgattattgccgagtaattgatatacctcactgggcaaaagagaattccatgacgagtcagcaagtgtcaagactttgcgcttgtgtacaaagacacggcattgattctttcaaggatttagcccctaaagccggcgaatatttgtcccaagcacacgtactttgcgacatcgtagcttctatcgcattcgcgctcagcgaagccgcagacacgattccggatgaagatacgtttatcaatgcctgcaaagcagcattcactctctcacgacgtaactcactaggattcggcccatcgcgaaatagacataggaaaaacacagtcgcagcacgcaaatcacggcaggaaaacgatgatgaggaaagccaaaaacgatactctgatggagactccatctcaagtaatctgctcaccaagattttaatggatatcagtaaggacgtttacgccctactgatggagtacaaaccccagacgaagcaattcctccaagcggttcaggccacagcaatattgttttgccccgatccggatagccataagctcacatgggacgtgtgcttcattccactattccaaacggaaatctgtgatgacctgcgtagcaagttgaatcaagacatcattactgcacttgaatatgggaaaacggatatctgggacaacggggctagggcatactggtaggcagagctgacttgatgtggcgccttgaagacgctgcatcaagtcagttcttttggttggggacgagcatgatctcgccgtcggcaatgcccttgagatgctggccgtaggggctcttgccgtaacgatccgcggactccatgagctcgtcgcgcgtgatccaaccgttctcgaaggcgatctcctccacgattgcgatcggcagaccctgcgcacgctgcacggtacgcacgaactcccccgcctcgaacaaagaatccatcgtaccggtatccaaccacgcgtaaccacgacccaacgtacgcacgttcagcatgcccgcatccaaatacatacggttcaaatccgtgatctccaactcgccacgcgcactcggctccacccgcttcgcgtactcgaccacgtgctcgtcgtagaagtacaggccggtcaccgcgtaatgcgacttcggcttcgcaggcttctcctcgatggacacggccttcctgtcctcgtcgaactcgaccacgccataccgttccggatcgtcgacataatagccgaacacgctcgcgccctcgccggactcggccttcgcgaccgcgccacgcagagtcgcgcccagaccgttgccgtagaagatgttgtcgcccaacaccagcgcgcacggctcgcccgcgatgaactcctcacccaacaggaacgcctgagccaacccgtccgggctgggctgcaccttgtacgagaaccgcaccccgtaatgcgaaccatcacccaggagccgctcgaagttcggcagatccttcggcgtgctgatgatcaggatgtcacgaatcccggccatcatcagcacgctgagcggatagtagatcatcggcttgtcgtataccggcagcagctgcttcgacgtgaccgtggtcagcggatacaacctcgtgcccgaaccaccggcaagaataatgcccttcatgtggattccccttctctattgcgtattgtcaaatgccgggcgaccccgcgaagagagccgcccaagcatggtccgctacttgttcagttccttggtaacgtatgccttgagggactcctcccaatcgggcactttcaaccccgtcgcctcgatcttcgacaagtccaacgcggaatacgtcggacgcgggctcaccgggttcttcgcgttcgcgaaatactccgcagtgctgataggctcgaccttctcgccgttcccgttcgccagatcgaacaccccacgtgcgatatccgcccaggacctcaccgcgcccgacccggtcagatcatacgtgccatacgcggcgtccgaaccgagcaggtggaagatcgcctcggccatatccctggtgaacgtgagccgcccgtactggtcatccaccaccgtcaccttcggtagctcgcccttcgcgacccggccggacaagcccatcatggtcttcacgaagttatggccctcgccgatcacccaactcgaacgcaggatgtaatgacgcggcgcgttcgcgaccgcgatgtcacccgcggccttcgactgcccgtacacgcccaacggagcgaacgattcggtctcgtcgtgcagctcgcgcgtcccgtcgaacacgtaatccgagctcacgtgcaccaacgtgatgttatgctcacgggccacacgcgccaacaacgccggcccctgcgcgttcgccttccacgccaaggcacgaccctccggggtctccgccctgtccacggccgtgtacgcgcccgcgttgatgatcgtgccatacaggctccagtcgaattggtcgtactgggccggatcggagaagtcgaacgtgtcgatgtcgttgaactcgaacccctccagaccatggctctccacgtagtcgcggatcgcgtggcccagctggccgttgcagcccgtcaccatcgtacgacgcggcgccatgggcttcgcatccctgagcatcggatgatgcaaatccgcctcggaccgctcggactcctccaacgggatcggccactggatgtgcaggtccgggtcggcgaggttcacgaacgtgtacgtcctcttctgctccagactccagtgcgcgttcaccaagtacgtgtacacggtaccgtcctccaacgcctggaagctgttgcccacgccacgcggcacgtagatcgccttgctcggatccaacacggtcgtatacacctggccgaacgagtcgcccggacgcaaatccacccacgcgccgaacaccgagccggccgcgatggaaatgtacttgtcccacggctccgcgtggatgccacgcgtcacacccttcttcgcgttgaagctgatgttgttctgcaccggaccgaaatcaggcaaccccaacgcggtctgcttcgcacgctgccaattctccttgaaccagccacggttatcgccatgcaccggcagatcgaacacaatcaggccgggaatgttcgtctccacggccctcaaatccttctcgaaatccatcactcactccatcctcaaaaaacatcaaaacacaggcggaaaccggcacgcccggacccgcgtcccccacgcggacggacaaggaaagggagcatgatccgattcccccgcccgtccacgcggtccgggcctcactggccctgccgcttgtaacgctcctcggtcgcagccttggccggctcccaccaggcacggttctcggtgtaccattcgatcgtctgcgcgaggcccgattcgaagtccgtgtgcctcggcgtccagcccaattcggtgcgcagcctggtcgagtcgatcgcgtaccggcggtcatggcccggacggtccttgacccagtcgaacgcgtcctccgcctggcccatcatcttgaggatcatgcgcagcacggtgatgttgttcctctcgccgtccgcgccgatcagatacgtctcgccgacacggcccttcgtcaggatcgtccacacgcccgagctgtggtcctcggtgtggatccagtcgcgcacgttcaggccctgcccgtacagcttcggacgcttcccgtccaggatgttcgtgatctggcgcgggatgaacttctccacatgctggaaaggcccgtaattattgctgcagttcgaaatcgtcgcgcggatcccgtacgtgcgcgtccacgcgcgcaccagcatatcgctcgcggctttcgtcgacgaatacgggctggacggatggtagggcgtatgctcggtgaacttcgccggatcatccagcgcgaggtccccgtacacctcgtccgtgctcacatgatggtaacggatgccgtacttcctgaccgcctccaacagacggaacgtgccctccacattcgtcctcaaaaacggttccggatccgcgatgctgttgtcattatgcgactcggcggcgtaatgcacgatcgcgtcatggcccggcacgatacggtccagcagatccgcatcgcagatgtcacccacgaccaattccacacggtcctcgggaagacccgcgatgttctccggattgcccgcataggtgagcttgtccaacacggtcacatgcacgtccggatgatggtcaaccacgtaatgcacgaaattcgatccgatgaaaccacagccaccggtcacaataatgttcttgggagtaaacgtctcttcagccatacccccgattttacaacgacccatccacctccaccccatacggtgtcatgcgtaaattttccgaaaaaagaaaacgttttatgtatatatttcatacaaactttacccaataaccccgagctcacgtttgcatacactgaaaatttttgcaaactccttttcaacgctccttcacgccacaacttgcaatcgttacgcattccacctccacaaattgccattcgatcggggtaacccctgcaaagctgacagcaaatttttgcaacatccattgttgtttgcagcaacgattttcattgacattccgccatttttcatactttggtgctctgcaaaaggtatagaatatacggcatacgttcgcaagagagcaaacgttatcagggaagataaacccccgtcataaggggccgtcagtaaggaacaaaggagtcatgaaacatcggaaacccgcaccgacctggcataggctggggctgaagattagcaagaaagtggtggtcggcatcaccgccgcggcgaccgccttcggcggactggcaatcgccagcaccgcagcacaggccagcaccgatcgcgacagctacgccgacaccgttgaaaacaccacgttcgaacaggcgcgcaagcattacggactagcgcagcaaatgagcgagggcgccaccctgcatgcatgggagtggagcttcaaaaccattgaggaaaacatccccgctattgccgaagccggttacacctccgtgcagaccgagccgatttccgctattcataacggcggcaagggcatgatcttcaccgagaactggtactacgtgtatcagccgaccgacaccaccatcggcaactgggtgatgggcaccgaagatgatctgaagagcctgtgcaacacggctcacaagtacggcgtgcgtatcatcgtcgatgtggtagccaaccatatgaccgcgacttggggcgccatcgccgatcgttggaagaagtccgagtactaccaccacgactgcaatgacggtgatgtgcaggattggaacaaccgctatcaggtgacccactgcaagctgctcggcctgtatgacatcaacactgagaacaccgaaaccgccaacatgatgcacgatttcctcgtgcaagcggtcaacgacggtgtggacgggttccgtttcgatgcggccaagcacatcgaactgccggacgagtataacggctcccagtattggaacatcattcttaacaatggcgcgcagttccaatacggcgaagtgttgcaggattccatctcccgcgatagcgactatgcaaagctgttctccagccacagcaagaacggcggcggcgtcaccgcatcctcctacggcagcaagctgcgcggagccctgaattcgaagaacctgaacgccggcaccctgtccgattggagcaactccgccagcccgagcaatcttgtctcttgggtggaatcgcatgataactattccaatagcgatagggaatccaccggcatgagcgagtggcagatgaccatgggctggggcgtcatcggttcccgctcccagaccatgccgctgtacttcgaccgcccggtcggttccggcggcagccagccacagttctccgaggagagcaaactcggcgatgccggtgcggattcttggaaggatgcgcaggttgtggcggtgaaccacttccgcaatactatgaacaacaacaaggcttcggagtatctgcgcaactgcggcgcgaattcctgcctcatggtggaacgctacatcaaggacggcaacttcaagaacgacggcgtgaccatcaccaacatgggtgatacgcaagagctgtccggcactgccaccaaccttgacgacggcacctacaaggaccaggtctccggcggtaccatcaccgtttccggcggcaagatcacttccggctccgctcccggcggcaagatcagtgtgttcttcaccgacaattccggttcggtctccgcaaccccgggcgacagctcgttcaagacggacaccactaccgttaccctgaatgcgaacaacgtcaccgatgccacctacaccacttcggagggcaagtccggctcgtatcaggatggcgacaccatcaccatcggcgcctccacggcaatcggtgacaccatcaccgtgaagctgcagggcaaggatgcggatggccaaacggtctccgcaacatacaagtacacgaagaaggatccggccgccaccagcacggcttatgcgaagaagccgagtgcgtggagcaacctgtacgcctatgtgtatgtagacgattcgagcgccaccactttgaaggaaaatgcgaagtggccgggcgagccgatgacacaggtcgcttcgggagacacttgcggcaaggatgacgagtacaagtatgagattcccgacgatctcgagggaagcaatactcgcatcatcttcaacgatggcaatgccacgaatacccagaagtaccctgccgacaccaccgaaggcgtagatgccgctggcctcaagatcgacggcaattacgcttgggacggcaacacttcgtccggcacctgggaggcccgcaattgcgtggtcatcccgaccaagtccgtgaagattgatcagggcgactactccgtggatctgtccgatggcgtggccacgaagcagttgaccgccacgaccgatccgaagggcgcgtccgtgagctggagctcgtccgacaaggacgtggcgaccgtcagcccgaagggcgtggtcaccccgaggaaggccggcaaggccacgatcaccgcgaagtccgggaccaagaccgcgtcgatcaccgtgaccgtgaccggtgagcttccgcctgacccggtcgcgaagaacaccgtctacgcttcgaagccctcgggctggggcaagatctacgcgtacgtgtacacgggcgacggcgcgaccgcggcgaacaacgcggcctggccgggcgtggagatgaccgccccgagcgcgaccgacggctgccagcagaccgacctgtacaagtacgtggtcccggacaacctcgccaagggcgcgaaggtgatcttcaacgacggcggcagccagcagtatccgggatcccgccagccgggcctggactacaacggcggcatcgtgaagtgggacggctcctccgcggccctggccgcggtcgagtgcgagaccaccatcccggtcacgtccgtgtcggtctctggtgatggcgtttcggacggcaagctctccctgaagtccggggcgagcgcgcagctgaccgcgacggtcaagcccgacaacgcgacggaccgcaaggtcacgtggacgagctcggacgctcgagcgtcgcgaacgtgatgggcaccggcgtggtcaccgccgggtcgaaggccggcaaggccacggtcaccgcgaccgcgggcggcaagagcgcgtccgtcgaggtcacggtcgaggcgcaggatccgtacgccgagctggacgcgttggcgaaggcccacgcgtcggatctggaggacggcacgtacacggtgtcgaccgcgctgaaggacggcatggtcctggacgtggcggacggctccgcgaaggacggcgcgaacgcgcggctgtggtcgtcgaacgggacgaaggcgcagcggtggacggtttcgcacgactcgaagggctacgtgacgctgaggaacgtgaattccggcaaggcgctggatgtgaaggacggcaaggccgcgaacggttcgaacgtgcagcagtacgcgccgaactcctaccgttcgcagaagtgggtggcggtcaggagcggatcggtgtacaaactggtgtccgcgctttccccgtccatggcgttggacgtgaaggacggcaaggccgcgaacggttcgaacgtgcagatctacaccgccaacgggtaccgttcccagcagtggacgttcgggaccgtcggccagtccctgaaatccgcgacggtctggtaccgtccctcgtccacgcagtcgcgcgtgcgtgtgcagtggcgcgtgtacggcagtccggacacgaccggcggcgtggagatgacgcaggcgtgcggaggctggtggaaggccacggtgccttccgcgggctccacgaaggtcggcctgtcgttctcgtatggttccacgacggatgacaacggcgggaagctgtacgacgtgaagggcgagtccgcggccgtctcgggcgggcaggccgtgaccgacgtcacaccaaactgcgcggtaaccaacaaatgatgtgactctcaacgctccgtaaaacaccatcagaggggtggcctcaatgaaaaccattggagccacctttttgaacccaaaataagctgaaaggataaaggaattatcgcgatgggacgctaatgtccctgaacagaagaacgataatatctacattcttacgtattttagcttcaaatgtaaggaaaataagggaatcaatatctatgtgaatatctgctgtttcaagactgctaggtgttaggtcctttcatcacatatacctcgcatggtggtgagaggattctaacagccagtggccttgagacaggcagacattcacttaagatctatgacagcatccccactcgttcttattacctagcatgcgctcatccggctaggtacatgtggaagctatcctcaaggctttcttgcgcctccggtaacttttaccaccgccgactcgaacattgcgaccttgggcttcgacatcttcaattcgaacacgttggcctaggtatcgggcatcgcgtctaataactcggtaatcttcttggtaaagagctggtcaaccaagtttcaaatatgtgccagtcaatctgtataatgcccaagcatgattttgcctcttggtttccaatcgcgctttgctttgttgaatgaaaaagcacacaaggcgcagaccacgtcttcctatatcaagggcaaaatccgaaagtatgcaggattttgggcattatcaacgcatatcatatttttccctgaaagagctacaaaaagccaaagcaagcatcagcatacataagacaacaggcttatcataacattcaaagaaaaaaaccgagaagagtaatgcaatgcacatagcttgtggagttccaatcattcttacaatagagatatcactcatatgcatcgtcttaaatccaggtatcaatattaaggaaagaagaatcaaaaagagcatgtagcccaaaataccaatttcaaaaaaagctgttacatattgattatcaactgtaaaaaaatctttcgaaacaaaataaatattattcacattgagataatgtgcaagcgaaccaaatccattccccaaaaaggtcgctaatgtcatttttttagataggtattgaagtaaaaaagaaattgacccagatctttgcaaaaaagagccagaatccaaaagagttgaaaaacgaccaaaagtcatggagtacaaatacgaattaggagacacagaaatcgaaaaaaatataacagctaaaaatataaacaatagtacaggaaaaatcctaatgcgaatttcagataccttcttatgtttcttaattgctaaaagtataagaagcgtacacatcataacaacatacacagatcttgtctgcataagtacagtagtcacaagagatagcgtagacagtaggagataacgcttattcctagattgattataaaaccctaaagcaataattgcaatagatatcgaaaacaccgatccagtaataggatgtgcggtaattccagttgctcgataactagaagttgagtcgccgttaaaagcttctatcccaagaagcgagataaaaggattgtagtgtgtaaaagtttcaaaaaaacataaaataacatgaagcacaccgacatataaaatatttttaagtaaggaatcgccgtatttaaatctaaacgctttaataatataaaaaaaaacggtcgcaagtaataaaaataaaaagatacgcgttgacgaataattcaacagactgtaaaaaacttgcattaaagaaataaaagtcaatgaggcaataagaagcttcttttcggcagtaattgaaagagctgccataactccgacaagcagaataaaaagtagggcactacttgaagattttctttctactaaagcattcaaaatgataatagttattagatatacttcagcaaagaaatatgagagtggaagttgcataaataattttcgtctatcgctcgttgacaaaaaaaacatttaacataccttaatataaaatgagtatactagattaagcttaaagtactaagaattattatgaaagcaacatcaaaaaacttataactggaacagataccgccttggctgacataatgtttatagatatattcacgaatagccgaagtgtctactgaatagtaacgattttaatacaaattaaaaaaagtcatacataagataatactgcatttaatcctttctttaagataagtttttaaaagaactttgcttggaagataactcttcctaattcttcttcccaaaacttcaattatcttattcttttgatcttcactcgtgaagaaacgaattttagccaactgagaacgataagcaattaattctgcgatagaaatatattttttatagtcattagttttacctaatgttgcataatactctttgacattatctattgaattgcaaatatcaagaatttttaaagaatattgtctactaatacttccctgaacaattctatatcccataacttcttgatctagtagaactatttttgcaatagccagtattttcaaatacaaatttaaatcttgaccgatttttaacggttcaaattttatcccatgagagttaagaaatgtttttttaaacagcttgtttcctgggagaggtgcacaaagaacgaattgccaattcttatctaaaccaacaacacaatcacgctgattcattttccttaagaaatgcccctgttcatcaatctcatcgtaatttcccattacaacatcagcagaattaatagtcatactatgaagcatgttttttagagcattaggaaatagcaggtcatctgcatcaaagaaaattacatactcccctgcggcatgttccaatccattatttcttgctgcgggagccccagcgttctgctgatacagatatttcacgaaatggttcgaagtacagtattcttttattacttttcctgaattatcagtagaaccatcatctacacaaatgacttccagatcaacattctgcatctttatagagtttaaacaggcaataatgtatttttctgcattgtagacaggaattataacagatatcattatatctccatcgaaaacatttaagctaagttatccaataacaatcgtttagtgagtacggctctaacgttaggcgatacataccctcaaatggtcatcgtctttcttcctcaagtatattccatgcttaaaaagccgatcatcattaccagtttgtctaaaactgtttatgtttggaataggcatcatctccgataatccagacaattccgatctttgctaaattttgcagaatggcgatatatccccctaagattcagtgtttcctttaatttgattatcttccttgcgctttcaacaaatagaaagcccccatactttttgctacatcttggatgtcatatccagcattcttaacagaatcagccatcttcaacctagattctccaaaatcatatttcataacctcgcttgcccaacctttttccccaagacttagcggaagaaaatgtgcctgatcgctcagtctcacttcctttgtaatgtcgtccgaaaagaagcatggtaaacctgaacattcagcttctattccagcaaccggtaatccttcatagagagaaggcatcaaatagcaatcagcagcggacaaataatcttgtacatttggctttacacctaaaaacagaacaatgtcacttaacccaagctgccttacttttgatttatacaaacctttcaaagggccatcaccgagtaacagcagttttacatcatgcctatctttttttaagacatcaacaatatctaatataaaactctgattcttttgttcggtgaatcttcccgtattgatgattgtaaaactattgcccaaactcaattgtgttctaattttttcacgaattgagttattaaataaaaatcgattaatatcaataccattatgaactatttgaactctattttcattaagtattttttttgaaaaaacccattctgccgccgcttctgaacaagcgaaacagtctgtagcgtatttatcaatgagagtttggcagtacttgtaaatcgctagttttaatttagattttccactcactgcggcactatgggaatgatatatgcggactgggacaccagcctctttggccgcttttagatagaaagctctaagcggcgttgtataatgtacatgtacaatatcgtaatgatgcttcttcaaaaaaactttaatctgatgagactcctcaagcactcttagtagtgtattctcaatatcagaatgaatacagtacttctttccgcctaaagaagctatttcatcatcgtaaaattctttttgatcacgtaagactaaaaaatcaaattgaattttacttctatctatatttcgatagacattcattatgaatgattcaattccagcagctgacaacatctccgtaatatggagaatccgtttaggtgtactgttcatttttttagtttctttctaatagtagctgcaataaccatcattgagtagaggcctatcttagaagagaaaataattaatttcctagaaaatggaatattgattttctttatattgtgaaacaaatcgataacccattcttccgtagaaatggaacgaatttgctttaacttttcagtatacgaaatatcattatttcggactacgccattttgacaaataacaatatacgcaattgcagcaaaagaataataagcactcaagctttccaaactatctgttttcatataagagtaaattttctttattggataagcaaatttactctctacattggagtcatatccatggatcgctgattgttccaaaatcctgtagtgcaaaaggcattcatggacataaaatgctgacttaacttgtttatacactctaaaattaaaatcaacatcttctgctgttttcatctgttcatcaaaataaatgccttcaatgcattttcgtgaatatagctttccccacggtgttatggtacgcatatcccaaagcgcagaatttttgcctactctataatagaaatcttttttataggtaaaatgttcaatatctttccctgcaaaattcttataataatcaaaaaaaataatatctactttcttctttttttcaatgcttatcagtttttctatacagtttggaatcaaccaatcatcagagtccaagaaaaatacataatccccacggcaaattttcaatcctgcatttcttgcagctgatggaccgttattttcttgattaataacaacaatgcgattatcccgaagtctagctttagtgattatttctaaagtattatcttctgaaccatcattgactataatcacctcaagattatgatacgtctgctttataacggattcaatacagtttccaatgtacttctcagtgttataagctggaataattatactaaccaatttttccattaaacatccgtctcacttctctataggttctcagaataaagcagcacgccatagcttccactatcattacgcatagtttcactctgacatcaaagaaaaacaaccctcatattcatcagctatatgctgccaagaatatgcttcaacaatacgtagagatgctttcttccctaattcggaaatctcatcagcattcattccatcagcccaatcaacaagcgaagccaaattacccgattgcttggtccagtacaaagcagaattctcagcaacctcacgattgaacccaacatccagcagcagattcaaatcggtagatccaagagcctccaacagactcggattggttcctccaacctcatgaccgtggaaatacccatacgcgttctcacgaatcttcatgagcagttctttgtcatatacagttcccacgaatttgatgcgaggatcctgatcgaagtgagtcttttccttcaactcttccaggaacttgtcactcacattggtaataagcgcaaagtcgcgtttagaatgactcttcatgaattcgcgaatcatggtttcataattgttttccggtacgaaacgtccaacaaccaaataatatgacttcggtgaaagacccttctccttataccaagcaatcagtttcggatcatcatcagctagtttgctcttacgcgtctcagcaccgtatgcgataaacgtagtcttcggattatatttgccgtactcatcatgaatatacttctcgatgtttttgctgtcacagataagcaagtcacaatgcttggtcatcaattgctcggagattttccagtacttgcgtactggcgcgctccacttggcacgcatccactcgtgtccatccggattgatatacagctttccacccagcttatgaattaccctctgaaaatgagcggcaaacggtccaatgcggcaagcaagaatatacacaatcggatgttgaatattatgcctcttgatgtacctcacgcactgattcagtgcagcaacatcataataaatcgcctgagcaggtccaatgctgggcaccttcacatcgaagcaatcggcattatgatattcaaaagtcttggtatctttagctttgcacgccacatggtatttcaaattcggattgttctggtggtactcagtgagcctatccacgaacgtttcatagccaccgtagttaccggggatgccctttgatcccacgataaaaacatgctgcacaaatgagtcgtttaacatttacggaatccttgattcgtttcagtcgcgtttgaacagatcgcgggtgtagaccttatcctgcacatcatccaggcaggaattatatcgattcgccacgatgacattcgaacgattcttgaactcgtcaagatcattcaccacttcagaaccgaagaacgtagcaccattctccaaagtcggctcgtacacgatcaccgtcgcgcccttcgccttcacgcgcttcatcacgccctggatcgacgactggcggaaattatccgaattcgacttcatcgtgaggcgatacacgccaaccgtcacaggcttctcggcgcccttatcgtattcattgttctcgtcatatccatagctgccggctttggccaacacacgatcagcgatgaactccttacgagtgcggttcgactccacgatcgcctcgatcaggttctccggcacatcctgatagttcgcgagcagctgcttcgtgtccttcggcaggcaatagccgccgtacccgaagctcgggttgttgtagtgcgtgccgatgcgcgggtccagacacacgccgtcgatgatctgccgggtgtccaaccccttcgactccgcgtacgtgtccagctcgttgaaatagctcacgcgcagcgcgagatacgtgttcgcgaacagtttgacggcctccgcctcggtgaaccccatgaacagggtcctgatgtccttctcgatggcaccctcctgcaacagggccgcgaacgtgtgcgcggcatccgcaagacgcccgtcgtccaggtcggttccgacgatgatgcggcttgggtacaggttatcgtacagggccttgctctcacgcaggaactccggactgaagatgatgttcctggaaccggtcctctcgcgaatcgacttggtgtagccgaccgggattgtggacttgatcaccatgatcgcgtccgggttgaccttcatgaccagatcgatcacggcctccaccgcggaggtgtcgaagaagttcttcctgctgtcgtagttcgtgggcgccgcgatgatcacgaagtccgcgtccgcgtatgccttctccccgtccagcgtggcggtcaggtccagttccttctccgcgaagtatttctcgatgtactcgtcctgaatcggactaatacgcttgttgatcttctcgaccttctccggaatgatgtccaccgcggtgacctggtgatgctgcgacagcagcgtcgcaagcgacaagcccacgtagcccgttccggcaacagcaattttaagagaatcgaacctatgcaaaacttctccattctactcaatacacttgtgtctaattatccccctcatatggacgaaccttcttataatgtagatggcacaaatacaagaagaaagcttgtctccgttaaagagaagcataattttaaaaaagcgctaaaggcaataacaaaaccaagatgctaaagattggaaattattaacattgtttaatcaatcttccgtaattcacaccgtctatgttatgaagagatgacataaggaattttacttatctcttacaacactaataatcatgcgaacaagagaccgaatgatttcatttctcatgagaatcatcgttaatccataagcaattaaagataacgtcacacttatgagaatatcaaaaaaaggctttgtaataagcatacgagtcacatagcaaatcaaacaaatagtgacacatccaatagaggtctgccccagattttttaaaaaagtactaggtatatatacctctctagctttaaatgcactgtaaaccatcacaataaactcagagacaatcgtagctattgccggtcccttaattccgcataaaggaatcagcataaaattaagtgcgacattacaaattgcagcaatacaagttgcctgtaaaaagaatttttctctcttaaaaggaagtagaacagcattagcgaaaaaacacgcaagattgccaaaaagcaatgcaacgcagagcaaccttagagagactgcgcctgaagaaaactcagcaccagatataatggtaataattggttccgccaagaacgccagaccaatcatcgcgggaaaaacgagaacaacaataatgtttagtgttttatccaaaagcagcttcgactctttaatatgctgctgcccaatataaaatgacaccctagggacagtgaccataataacggcgttaatgatatttttaataatagtgtaaattttgaccggaacgctatatatgccaacttcggtattcgacattaaaataccaagtattgttgtgcccgctgtaatataaaggatagttgccacactattactaaaaaggacaagaatcggtttgagatgtctacccatatctattttcttagttagggaaacgtgaacatatttccggatgtaggcaatattgcatagattgccgccaaccaccgataaaatcatacaaaacgcatatgcaagataatcattaggtccatgtacaaaaatgaacatgcccactaacgcgagacattgaaaaataatgtatctaattgtgatataaaagaaatcttcataaacattgttgacccagtccattcccaaagttgtggcaattatctgagaactttgaacaagcaacaataaaacgagattatggttttgaggccatataacaagaaagaaaatcaaacacgcatatgagcatatcgtcgagataacattgatcgtaaacatctgagaagcaaattgattaatttttgtttggtcatttctgactcttgccccctcacgaacagcatacgaagagatacctaatcctgcaatcagtacaaaataattaataatcgatgccgaaaaattgacaagaccataatgctccgcacctaggactcttgtggcatacggaaccgttatcagaggaaataaagccgacgttatttgccgtattgcatttaacaatgcatttttctttaatgatcgcttcttcaatattagatgctttctaataaactatctaaatactccattgacaagaagacacagtctgtcttcaattcaattctttggaaaaagagcatgaaagctacaacactcattgtaaaataattatataaattcaactaagcatttaacaagtattactccaactaatcctacttttcataaaactaacattgaagaaatgcactctttaattgatcaacaggtttcctccgcaaggagtctaagcatcgtagactctgccgctgataatgactcttcatctttcttttatcgcgattttcccacgccatgtcactacttccgtcttctttatgcttcacaacaatcgacgaaacatacatctgcctcatcccagtacgctggcaaagcaagttcagtatgtcttcttcaacgtaaagaaacgtcccaggatagaagccatcatattcattaagaaaattctcagtgaaatacaacacggatccatgcagcatctcaaattctggattcaaaatgtgcgtacgtgatccatcaatatgttgactacttgtttcctttttgacgagagagtgtttgaagtcgtacaacttcttaatgccgggcacatacctagtggaccaacatttaaagcttgcagctatctcatacattctaaatcgtccgtatgtgaggttacttacgggaacaggattgtggtttccgccatcagcattaataatggcagtgccgatcataccgacgcaagacttatactttaaatcaaccagatgctcaagataatacttgtcaaagaaaataacgtcattgtttgatactagtacttttcgaattcccatctccttcagaatcttaattccttgattattcccttttgcaaatcctagattcgcagaagtctgaacaacggagatattttcaacaccagaaaatttattccgaagtacctgatatgactcattggctgaatgattgtccactatgacaatataaaacgctttatatgattgtcccagtaaagatttcacgcactcgagagtatctttgtaatttaaatagttcagaatgactattccaagcgtcttttctgtaatatccatcttcataccaaccctttatctcaagttaaatcaaaagaacaggattccagccataagagggagaacataccgcccccccctctttcaaggagtaaccgtgcattctggaatattacccccatccaccgccagaccattatgggcaagtctgcattctaccttccactttaaccatcagaggggtggctccaatggttttcattgaggccacccctctgatggtgttttacggagcgttgagagtcacatcatttgttggttaccgcgcagtttggtgtgacgtcggtcacggcctgcccgcccgagacggccgcggactcgcccttcacgtcgtacagcttcccgccgttgtcatccgtcgtggaaccatacgagaacgacaggccgaccttcgtggagcccgcggaaggcaccgtggccttccaccagcctccgcacgcctgcgtcatctccacgccgccggtcgtgtccggactgccgtacacgcgccactgcacacgcacgcgcgactgcgtggacgagggacggtaccagaccgtcgcggatttcagggactggccgacggtcccgaacgtccactgctgggaacggtacccgttggcggtgtagatctgcacgttcgaaccgttcgcggccttgccgtccttcacgtccaacgccatggacggggaaagcgcggacaccagtttgtacaccgatccgctcctgaccgccacccacttctgcgaacggtaggagttcggcgcgtactgctgcacgttcgaaccgttcgcggccttgccgtccttcacatccagcgccttgccggaattcacgttcctcagcgtcacgtagcccttcgagtcgtgcgaaaccgtccaccgctgcgccttcgtcccgttcgacgaccacagccgcgcgttcgcgccgtccttcgcggagccgtccgccacgtccaggaccatgccgtccttcagcgcggtcgacaccgtgtacgtgccgtcctccagatccgacgcgtgggccttcgccaacgcgtccagctcggcgtacggatcctgcgcctcgaccgtgacctcgacggacgcgctcttgccgcccgcggtcgcggtgaccgtggccttgccggccttcgacccggcggtgaccacgccggtgcccatcacgttcgcgacgctcgagtccgagctcgtccacgtgaccttgcggtccgtcgcgttgtcgggcttgaccgtcgcggtcagctgcgcgctcgccccggacttcagggagagcttgccgtccgaaacgccatcaccagagaccgacaccgactcgaccgggaccggattatcagccacagcaacaacgaccgaagccgtcttaccgccagcagtcgctgtaatcgttgcagtgccagccttcacagcggtgatcttgccgtcggacaccttagccacagaactattcgagctggtccaagagaccgtcttgtccgtcgcgttcgacggggtcacggtggccgtcaattgcacgctcgctcccaacttcaggctcagcttgccgtcgctcacaccggaacccgaaatcgagaccgaagagaccggaaccggctgcggggtgttgcagttcaccgcactcaccgcggcggaagagccatcccagctgaccttgccggagaattcgatgccgggctggctggcgccaggggtctgcgctccggaaccgttggtgaagattacacggtacttgccttcgcccagatccggtacctcgtacttgtaggcgccggccttcgcacaggaatcgtcggcggtcagctgggtcatttcaacgcccggccagttgccattgttcttggacgtggtgtcgttgtacacgtaggcgtagatcttgttccagccggaaggcttggtggcgtagatcacgttggagacttccggcttcacgccggtgatcgtgatggtgatggagtcggatttcttgttcgtgccggcagtggcggtggtcttcaccgttcccgccttaaggccggaaaccttgcccttggaatcgacggtggcaacagaagtgtcggaagaagtccaagtcacggaaggacgcttgcccgccggatcggttgtcacatccgccttgagctgcacgctctgcgtggaagcgagatccatggaagtgtcgccggaaaccttgatggcagtaacggtcacatttcttggatggcaaggctctttggcgtcaatgtagcaatccgggtccagaccgttcttttccatatactccatgcaatatttgtcgcacgggctggaagtgccgtcactcgggtcgtaagtaggatcgccatacttggtgtaagagtacgtgtgcttgatggtttcgccgtctgcaccggtgcccttcactgtgaccgtcaccacttcatccgacttggccttgctgccgatttcaatggtgtcgccgtccttgaaggaaccggactgaccgtcggaagtggaataggtggtgttggtggactggtaagaccggagagtgatcgtcttagattcgccagggatggtgcccttgttcggatatgcctcggcggtggagaccttgccggaacgggtcttattggaaaacgccgcgatggactggcccttcaccgtgccggagataaccttgccgccggaaacggtgatggtggaaccggtcacttcatccgtataagtgccgttggccagcttggtggactggccggcaagattcttgtcggaaccgttcgcattggccactaccatgccgtcctgagctgcggaaccggcataacgctcgaccatcaggcagttgtcgtcgccgcagttggagacgtttgatgcttcgccgaccatggcgttgcggaagtggttgacggccacgacttccgggtccttccacaggtcggagccggcgtcgccgagcttggagttctcggtgaacggaccgctgccattaccgtaagtgccgacgccaccagtgccatacgtgccgccgtccttgtacgggcggtcgaagaacaggctcatgccgttcttctgcgcggtcacaccggcccagccgtacttgatccattcgtcggagagctcctgtggaatgttggcttcgccattggcgaagttatcgtgcgattccacccagttcacggacttgtcctcggtcaccttgctgtgggaggtgaagtggctcgcgccgagattcttgaactgcacggcgttgcgcacctcatgaccgtagctggagtcggtgatgccgccgccacgcggagagctgctgttgaacaggttggcgtagtcggcttcgcgaacgttggcatcttcaagcacttcgccgtactggtactgtgcgccgttctgcaggatggtgtcccaatagtgggactgcttgccgccgaatacctcatcagaaagctcgatatgcttggcagcgtcataccggaagccatcagcgccgtcggccacggtctgcacgagcagatcatgcatgcctttggtgacggtatcatcctgagtgttcagatcccacaggccagaaagcttgtgctgggtgcagtcctctcgattgttgtaatcggagatctgcttgtcttcatggtaataggctttgttcttccacttgccttcgatcacatcaaaatcggaagtgaagtggttggacacggaatcgacgatgatgcgcaggccgtactggtgcgctagcttgcacatttctttgaactcgtcttccgaaccgaccacatagttgccgatggacatgtcggttggctggtagacgtagtaccagttgagataccagttgccggtgccgagcttgcggttgtccttgattttgacgattggttcggtttggatggaggtataaccggccttggcgatatccggaatgttctccatgatggttttgaaggaccattcgaaggcgtgcagggtcgcgccgtccttcatatccttcggcaggccgtacttctgacgggctgcttcgaacgtcggattgccgatggtgtcggcgtaactgtcacgggtggcggcgttggcctgctgcggtgcggccgtagcgagtgaaagacccgcaagcagcgtggtggccgcggcaaggaacgccacggtcttcttgctcagacgagcaagcgttgctgattgtttcatcatcttccttgattggattgaatttgttcaggtaaggctgaggcccgatccccttggaatacggaatcaggcctcagctgtcttcggttattgtttgttggttaccgcgcagtttggtgtgacgtcggtcacggcctgcccgcccgagacggccgcggactcgcccttcacgtcgtacagcttcccgccgttgtcatccgtcgtggaaccatacgagaacgacaggccgaccttcgtggagcccgcggaaggcaccgtggccttccaccagcctccgcacgcctgcgtcatctccacgccgccggtcgtgtccggactgccgtacacgcgccactgcacacgcacgcgcgactgcgtggacgagggacggtaccagaccgtcgcggatttcagggactggccgacggtcccgaacgtccactgctgggaacggtacccgttggcggtgtagatctgcacgttcgaaccgttcgcggccttgccgtccttcacgtccaacgccatggacggggaaagcgcggacaccagtttgtacaccgatccgctcctgaccgccacccacttctgcgaacggtaggagttcggcgcgtactgctgcacgttcgaaccgttcgcggccttgccgtccttcacatccagcgccttgccggaattcacgttcctcagcgtcacgtagcccttcgagtcgtgcgaaaccgtccaccgctgcgccttcgtcccgttcgacgaccacagccgcgcgttcgcgccgtccttcgcggagccgtccgccacgtccaggaccatgccgtccttcagcgcggtcgacaccgtgtacgtgccgtcctccagatccgacgcgtgggccttcgccaacgcgtccagctcggcgtacggatcctgcgcctcgaccgtgacctcgacggacgcgctcttgccgcccgcggtcgcggtgaccgtggccttgccggccttcgacccggcggtgaccacgccggtgcccatcacgttcgcgacggagctgtccgagctcgtccacgtgaccttgcggtccgtcgcgttgtcgggcttgaccgtcgcggtcagctgcgcgctcgccccggacttcagggagagcttgccgtccgaaacgccatcaccagagaccgacacggacgtgaccgggatggtggtctcgcactcgaccgcggccagggccgcggaggagccgtcccacttcacgatgccgccgttgtagtccaggcccggctggcgggatcccggatactgctggctgccgccgtcgttgaagatcaccttcgcgcccttggcgaggttgtccgggaccacgtacttgtacaggtcggtctgctggcagccgtcggtcgcgctcggggcggtcatctccacgcccggccaggccgcgttgttcgccgcggtcgcgccgtcgcccgtgtacacgtacgcgtagatcttgccccagcccgagggcttcgaagcgtagacggtgttcttcgcgaccgggtcaggcggaagctcaccggtcacggtcacggtgatcgacgcggtcttggtcccggacttcgcggtgatcgtggccttgccggccttcctcggggtgaccacgcccttcgggctgacggtcgccacgtccttgtcggacgagctccagctcacggacgcgcccttcggatcggtcgtggcggtcaactgcttcgtggccacgccatcggacagatccacggagtagtcgccctgatcaatcttcacggacttggtttcgatgaccggtccggaaccgccgatgttggccatcttcacgctgaacatgtcgtcatcggacttctcgaaggagttgttcacctgagaaccggtgtccggcaggtcggcgttgtcgttcattgccagatcgtacggcagggaatccatggcggacagaccgaaggtggctgccagctcgatgccgataccgttcgaggcaatgcggtcagcggtggtgccgatctcttccagcgggatggcgatctcgtagtgatcatccatctgagcggaattgtggcccttctcgttgaagttgacccacttggccttgttctggttctcggccttcatatcgccgatgaaacgaccgttgttttcaccccagccaccgtcgatgccgatgacatccttgcttagaatgccattgccatagccgaacttgatgttcgacttcttggtgttggtggcggcgttagcagccggaccatacgcagccttggagttcagaccagtctcgtcgcccttgtagatccacggaccgttggagccgttggtggagatggtcaccacattgttgagcttctgctcgccgccccaagtgatgttggatgcccacagggaaccgccggtctgcagaccgccgttgttgccgatgcgggtgctgtcatccttggtgtcgatggcgatgtggaacggcaggttctgggtctgccacaggtggccttggctcagggggtagtcgtcgccagtgtcgacgacatcctgcacgttagtcatttcccacatgaggtagaggttgtcgtcatcgtaggcgccatacaacgcatacagatcgatcggaacctcatacatggaattcgggcggtacacgcgcgggtcgtcgttggcggcgccctgcgcgatcagcatggagctgtcccagtcagcgatgctcgcgtcctttccggcgttgaagttgatggtcttcttgacgcccatgcccaccttgttggtactgtactgcgcggcaaggttctgcttcgggacctccaccttcttcacggtcacggaagcgctcagcgcctgacccttcttgaccttcttgccatccttggcggcggtgccggtcaccttgacggtagcggtctcgccgatggaaagagttttaccaacggaaatgacctttccgtcagtgaaggagccgctctcgccctcggtggtggtgtacttcagattgtcggcatcctgcgcgcgcaacgtgaccttgacattgtcggaggagaattccttggaagccgcttccacggacacgttcggatcggattcgcccttcacgtagaagacgctgaccgcgccgcccttggcggtaccggaaacgatcttatggttggagaccacaagctggccgccattgacctcatccgggtaggtgccatcgtcaagtgtggtgtccatgccggaaaggctcttgtcgccacccatgttggcaatgaccacaccatcgttctgaatgccatcagacgtggagcgctcaatcatcaggcaggacttgtcgccgcagttctgcaggttctcgcccttgccatccatggcgttacggaagtggttgactgccgcgacggacttgttcttccacatgtcgtcaccggcgtcacccagctgggactgctcggcgaactgcgggttggtgccgccagagcccttcggacggttgaagtacagcggagcgccggccctacgggaaccaacgaccgcccagcccatcatgatctgatagtcggtgaggccggtggattccttgtcaccgttggcgtagttatcgtgggactcaacccaggtgaccagctggtcttcgcttgcgccgccggtatcgatgttcttcaccatcttgacgtcaaggttgttcgagccgacagcggcgcgaatggtcttgccgtagttggaagcggtgttgccgccgccatcggaggaattgtcgcggaacatgttggcgtatgccttgtagtcaaggccggaatcgccctgcagcacctcgccgtactggaactgggagccgttcttcagaatggtgttccagtagttcgactgcttattgtcgaagacttcggtcggcagctcgacgtgctttgccgcatcgtaacggaagccgtcaacgccgtccgccacagcggtcttcaggaacttctgcatacgatcggcaacagcctggttctgcgtattcagatcccacaggccaagcaggtggcactgcgtcaccttgtaacggttggaataatcgttgatctcgccgttggggccgtcgcagccggtacgcttgtggaagtactccttgttctgccaatcggggtcgatggcgttccaatcggaggtgaagtggttggcgaccacatccacgatcacacgcacaccatacttatgggcggtggcggtcatttccttcaggtcagcctcagtgccgaccacgaagttgccgatggaggtgttcgccggctggtacacgtagtaccagttctcggtgaacttcttgccgttggcggcgacttccttgatcttgctcataggctcggtctgcacggaagtgtagcccgccgcggcgatctcaggcatgtgctgcgtgatggtcttgaacgaccacatccatgcgtgcaggatggcgccgttcttcatgtgcttggtcagaccgtactggttacgggccgcttcgaaagaagaatttccgatggtgtcctgatagctgtcacgatcggcggcaagtgcggtggatgccacacccataccgccgaacagcgtggcgaccgccaccgttcccgccgctactttcttccaggttttggccgcacgagccttgcgggccgcgcgcctacgctctgcacgggtcatcaactccggttgatcgtcgtgcggaggctcttttctggtgagtgcgttcgccatacccgcgaacgtatgagtgctgagtcgcaccttaccctccctgcttccttgcatctaactttgacaacgtttgccactagcagacgttgcgtcaaaaataccacatttttcctttgaaaaatgagtgatttttattgaaaaatggcagttaaaacgcaattgttttctgctctgttgcaaacgctgtcagcaacagatacactcataccagcaccccgtagcacccactatcgttgcaaattcacatatgcaaacgtttcagaaaattttccaaccaataccaccttgcgacgcaaagcaccctcgccccatcccacgccaccgacagcccacccccaacaatcctgaaattaatctttcagaagatgctcaaaaagggcttctttacctcttatggcatgcaacatgccaatcaaatcaaaatatcaataataaaaaatgggtgaatatcacaaacacgctcggactcaaaaaaatagagtagggccaagctatggtgaatcaatccatggacctaaaagaattatcaggcaacgatttgggagcggataggggcgggggttaccgtacggtgcttgcgcatgcttttcaggattttacggatcgcaccgttcgtctgttcggcggcgacgcagaacatgctgaattcgcggccatgcgggtcggcgatgtccttcggctggggaatcatcggacgaatcatcgaggacttcttgattaccgactgaagacgttcctggatggtcagtccggcaatcatattgttgcgagcgcagtaatcgcacatattcgcgaaatcgtcaagcaggaacgtgtatcgtacggcggctggcgccaacgtgacgatttccttgcgctgctgcttttcgaagcagaggatcaggtcggcttcgtcggccatctgtcgggtcagtcgtcgggaacggaagccgctcgactcaatgccgacgctttgcataaggcggccgctcgacggatcgatcggatgcatcggcaaaccacgcgtgccggcgcttgacacctgcacggtggtgccgttcagatagtgggtcatcagaagctcgcccataggggaacggcaaatgttgcccgtgcagacgaacatgatgtgcatgcctaaaccccttaaccgttcttccaacgtttcgtgttgcggttttgcgaaatccaccatggcttccgcaacccgccaaacggaaattttagcgcgaggcgttccccgcatgcggcaaatcgtccaatacgcgcagaatcattgcagaaattcggcgcgggcggtggcggtcagcgaatagcggaccgggcgggagccgtggaactcgagcaggttcctgttcaccagttccgcgagcgcggtgttggtcttccgctcccccacgccaagccattcgcgcattaggcggcgcgatatgggtttcggagcatcgtcgaaaagctcctcctgcagcaggaagtacagcatgttccgctgcagttccgtaatgccctgcgttcgcgcataatgttcaagcctcttccgcgcggtgtcaagcagggttttcttctcgccgagcacagagatgatgttcttctgggcggtggcgataaaacggatcatccgatatgagaacagcgagacgtcagaacagttcagcggatgctgcgcatcatcaaacgccttgtaataccggcctttcgcgtcggcgataaccggactcaggctgatcgccgtcggtatggacaggtgcttgctcagctgcagagcaagcaggaaccggcccgtcctgccattgccgtcatagaacgggtgaatgcattcgaaggcgtaatggcacatcacagcccgcagcagcggaggaatcgcctcatccgaaagcaacgccagccatttggtcaattgcacttggatttccgattccggccatgcgccttgatgaatctcccggtcaaagccgtcacacacagagacttgcttggctctgaataccattccgtcaggcttgtcttcctcccgtagttccccagccatcacctgatcgtaaatattacgtatgtcatgcaacgttttcggtagttccaacgttgcggaattttcgccggagagtccgagaaagagtttggcaagctcactcaaccgcttgtgcggcccgtccgcgaccgccgcatccaacgcgtctgagatttccttgcgcgtggtgtgcacggcttctatggagttcgtgctctgcatttccgcgccgatgagttccatcagatacgccctgcgggcaatcggcggcaatgcggcccacagcgattcgacctgcacttccatgccacggaccgaatccatgacgttcaacagttccctgaacgccacggcgaacatctcatgaccttcgaattcaatacctgaccggtatgttgaatagccgttgagtcttttttggtattcctcctcagccgcatccttcggcttggccgtggatgatgacattgccaatgtctgccgtatgcttttgtactccataaccatcatccttataaccgtcatttgtgcagaatatgcaggttcggggtgaatatagactattcccatacctacataatgtcaaaaatgtcggtatagcagcaggcgtgtttgcggctattggtacgttgaggggcatatgtggggatacgtgcggatatgtttgctatgcgcagatatgttcaagcgcagattaggtgcggatcaggcgacttcgagcgtggcgaggagggcgcggtggtcggagccggggatgtatgcggttttgaggttgcctacggtcacgcctttgtcatgcacgatgtggtcgatttcggcgattggcatcatggccgggtacgtcatgtgcaggccttcgcccgcctgctggccggaatccaggaagcggctgccgagcaggtatcggaagctggcgtggtcccatgtggagttgaaatcgcccatcagcacgtacagattgtcgtaatgctgcagttgggcgagcgagtcgagactacggttccacagaccttggttgcgggggcgcggcgagaacgggtggacggagccgaagcgcaccttgctgccgccgaaatcgattgtcgcggcggaaacgctgcttgattccacgggaatgaggttctgtttggcgttttccatcggcgcggcgctgtacagcacgttcacaccgccgttgtcatgccacgtttgctgcgcggccacggaatacggcagataattggcgattccggcgccgttgagccggttgagcaggtcccatgacacttcctgcagcgcgagcacttccacatgctcgtttttgacgatttcgacgatccgattggcgtcggcatgcccttccttggtgttgaaggtcatgatgcgggcgtaccggtcggacgtgttgggcaagccgttggacgagacttgcgtgactgcggtgctggccgcgtcggaaatcgtttgctgcggcctgatataaccccaatgccagccgatttgcacgaccacgcacaccacgctgacggtggcgagcaggacgcgtccgcctattgcacggacggctatcgcggtgatcgcaataatcaaagacagcatgcccagccacggcatcagcgcgacgataagcggcacgtaccgtttgccgtcaagattgttgggcagcatgcgcagcagcatggccagcaggatgacggcggtggccagccagagcaccgcggtcagaaggtgtgtcgctgcggtacggcgggtcatgccatgttgcgcgcggtcgagggggcggctggcgcatgctttgtcgagctgcgcgcccagatcctcgatttcgctttcgcttgtgcgttcgcgttcggcatcgttattgccgccgttctcacgctcgctttcgccggtttgccgcatggttgcctttcattacgctcccgttcaccatacgcaacacggcacgggtgcgccacctccttcccgcgaggttcacagtgcttttacgtgcacccgtaccgcatgccactatgcggacatttctctctcatttcctgctgcggggaatggcggcacttgagcgaaccacgctcaggacatgcctacgggacggcgaaaatacgggtatgggcgagtaggtcaggctaggcggcgtgggggtggacgcgattgagtgcgcgctggacggtgtcgcgggtggagccggcgccgttgccgcggacgccgaagaagaccatgaccaccatgatgaagcagatggtggcgctcacgcgcaacgcccattggatgccgaacacgttggccgcggcgtacatgttcttcgtgccgccgattgcggcccagcgcagggcggtaaacgtttccatcagaatcaccagcacgggtgcgccgatggcaccggcgatctgacggaccgtgttcgtaacggccgagccggcgctcacctcctcgggctccaggcagttaagcgaccacgtggtgatcggcatgagcacgaatcccatgccgatctggcgcacgaactgccagatggacacccaccaaatccatgaggtcatggaaatcaggctcatcatgatggtgccgaacagcagggtgatcgagccgatcagcgccaccggacgcgcgccgaaacggtcgagcgccttgccgccgaagaactgcgcgatgcactggccgaacgcgccgggcaacatcaccaggccgctgatcgtggcggaatagcctcggcaatcctgaatgtagagcggcatgatcaccatgatcgaactgaacgcgaagaacgacagcgcggcggtgacggtgccgacggtgaagctcttgtttttcagcacgctcaggttgagcagcggaggttgcttggacgggtcggccgactgccggcgagcgccgtggatctgccgcagcacgaaccagacgatgccgaccacaccgataagcatggcgagccacaccatcggatgtgtgaacgggtacgattcgatgttcgtgaagccgaacatgagtccgccgaagccgaaaatcgacaggccgacggagaagaagtcggcttttgcggacgcgtcgcgcgtgccgaaattacgcaggccgaatatcgccaacagcagcgagataacgccgataaccgtcagtgtgaggaaaatcgatcgccagccgttcaaatcggtctgcacaccacccaaagtgggtccgatcgcgggcgcgacgctcatggccataccgacggtgcccatcgccataccgcggcgggacagaggataaatggagaataccgtgatctgcagaaccggccacatcacgccggttccgacggcttccagcagacgcccgaccaataccagcacgaacgaggagccaagccaggcaaacagggagccgatggtgaacaccaccatcgaagcgatcacaatctgacgggtggagaaacggcgggtcaggtaggcggtgagcggcaccataacgcccatgacgagctggaaaatcgacgtcagccattggccggtcgtcacggaaatgccgaaatcggacacgatggtgggcagtgcggcgctcaactgcagctgagtgaagttgccgacgaacgtgataaaggtgagaatggcgatcgatacgaacgcggcatgcgtcagatggtcgtttttatacgattcctcgccggtaagtggctgggacaggccgtgggtgcggccctgtttcgcgtttattttcttttccggcttcacttccgacctcttctccggtttcgacggcaaaccgaccgccctccatcactcatccgcgcatactcgcagcgtattgcgcaactcctgcaaaaacagactcaaaaagtctagtactgcgggtggtcgaacgcgagatgaaactattcgaacacgttcaattccaattcaaccgagaaaaattggcaaaacttcgtatttgttcatctcggggtggtatacatatgcgttggcagtaacggcacgatacagggaaggaatacgccgcgcagggggttaggaagtatgaccgtagtcacgttattcaacatagcgatggagctatggggcgttctcatctgcatcgtttgcgcaggtggcgtctacgtgggcgcgatacgtaggacgcggcgtacctatacgaaagtttccatgcagcttctatgtgcgctgatgctgctggccgacgtgtccgcctggtatcacaacggcggctgcgacaagcttgacttctacatgacgcgcatcggcaatcttggtgaatacctgatcaatttcatcttcatcgcactgttcgccaactatatctggcaaaccgtcagcggcgacgacatgcttgaaaacgtcagcccgcacgagtggagggccagaacgagcggcggagccaagcgtaatcgtaagaaccaacgttcggccaatgcccgatccaagccgaaaaagccgcgttcgaagaagcttgacgtcatctacgcagcgtccgcgctcggcatcgtactgacgattgccacgcagttcaaccatatggtctactacatcgacagccagaactactaccgccgcggaccactgttcgctatcccgcagatactgggtctggtagagctcgcgctgattgtgatgctgatcatcgaaaaccgcaaaaacctcagccgaccgctgttcgtcacgtcgctgtcgttcttcgtgctgccgattgtgacaaccatcgttcagattctccattacggactggcgttgcaggccatcgcgatcacgatttcaatccagttcacgttcgtggtcgacaccatcgaaatgaacaagaaaatccgttcgcaggatgacgcctatcagaaggccagctacgaggcgcagcacgatggtctgaccgatttgtggagcaaaagcgccggccgcgaacagattgagaattatttcgcgcacatgcaggaaggcgaccaagccgttctgattttcgttgacatcgacgatttcaagcagatcaacgatacgtacggccataaagtgggcgatttctggattcgtgaagtggcgcagacgttgaagcggctgtaccggcatgatgacatcatcgtccgtttcggtggcgatgagtatgtggcgctgataaagaacaccgcgaacgagcgcgtgatcgaaagcacgctggacctgttccgccgccagttggcgcaggcgtccgcgcaatacgggcaggacgtgcattgcagtatcggcgcatgccgcgtgctgtccggcaagaacgtcgatctgaacctctgcttgggattcgccgaccatgcgttgtaccagtccaagcgcgaggggaagggcatgtacaccgtggtcgattatgacagcgggaaagtgcaggcagcgtaggtttcgtggaaaaatccgcgggaaatctgcgggaaaaaccctagaaaatcagctgagaaactacgaaaaaagcaccgcaaatccgccggagatcgacgtaaaaatcacggaaaatcaggctttgccgagcattgtcagcacaatcagcaccacgttcagagcgacgatcagcgcggcgaccgcgatattgacgacgtgcttgaccggaccgtccacgtactcccccatcagcgtgcggtcgtgcgtgtaacgcatcagcggaataatcgcaaatggaatgccgaccgacaacacgacctggccgacgatcaacgcttccgtcggattgctggcgaaccacagcaccaccagcgcgggtaccagcgtcaccacacggcacgcccacatcggcgctttgatgcgtagcaggccgtgcatgatttcgctgccggcgtaagtgccgaccgacgtggagctcaggctcgacgcaagcagaccaatcgagaaaatcgtgccgatcaccgggccgagcacatgctggatggcccgttgcgcgccttcgatggtgtcggtgccggtcatgccgtacagcgagttcgcggcgaggatgagcagcgcgaggttcaccgaaccggcaagcagcagcgcccaggccacgtcgattttgctgccgtgaagcagcttcttcacgctcggcttcgcttcgccgggggcgtaatggtcgttgacgagcgtggaatgcaggtagatggcgtgcggcatgaccgtggcacccagcatggacgtggccatgagcacggtgtcggtgcctttgaagcgtggaatcaagccggcgacgacttctttcggatttggcggggcgatgaacaggccggcgatgaaaccgaacgtaatcaccagcagcaggccgatgatcagtttttcgaaaatgcgatgcgtggcgcctttttcgaaaatcagcagcaccgtcgacaccgcgccgatgatgcagccgccgacgaacagcggcagaccgaacagcagtttcagtgagatcgcaccgccgatcacttccgccagatcggtggcgatggcgattacctcagcctgcatgaagaacatgaaacggcccgcgtcgccaagccgttcgcccaggatttccggcaggcttttgccggtgacgatgccgagtttcgcggactggtattggataagcacgctcatgcagttggccagtaccagcacccacaccagcaggtagccgtagcgcgcgcccgacgtgatgttcgccgccacgttgcccggatccacgtatgcgaccgccgccacgaacgcggggccgaggatgccggcgagcgcggggccgtggtgatacggccgggcggatcggtcatgctgcgcagtgatcgtcatattcttcgaatccatatcgttcttcatatccacgcaacgttatagtgcgttttccgcgcagaattgttacgtctgttacggaaagctgaacagctgccgaacatgcgccgattgtggggcggacaggccgcgatcacggaagccgctaaactggtgcagagaacatcgcatttcgactcaaggggttgttccatgactgttttccacactccgatgatcacgctttccgacggcaatctgattccgcagatcggcttgggcgtgctgcgcatcgacgacgagggcgttacccccgtggtcgagagcgcgctggaagccggttatcgccatatcgatggcgctgcggggtacaataacgaggctggcgtcggacgtgcgctgcagaacgcgggcttcacgcagggtgagaatcgcaagaacctgtgggtgacgacgaagctgcgcgattcggaacaggggtacgattccgcacgcaaggcgttcgaccgtcagcttgacctgctgcagctcgattatgtggacatgtatatgctgcattggcccaccccgttcaattggcgttccggcgaaacgtggaaggcgttcgacgagttccgcgcggagggtcgcgtgcgtacgcttggcgtgtgcaatttcctgccggagcatcttgagcggctgcataaggaaacgggcgaatatccggccgtcaaccagatcgaactgcatcccacgtggcagcagcgcgaggtggtggcgtattgcaaggcgcacaatatcgcggtcgaggcgtattcgccgatggcgcgtggcgcggatctcaatgccggcgatggtgtgatcgaacgcatcgcgcgggcgcatggcgtcaccgaagcgcaggtgatcctgcgatggcatatcgaaaacggcacgatcatcattcccaagtcggtgcatgcggaccggcagcggcagaatctcgacctgttcggtttcgtgcttgacccggacgagcatgcggccatcgacgcgttggatgggccgacgcgtgcgggacatgatccgatgacgtttacgtatgcgtgactcgcgtttccgcaggcagcgtttcaatgccaacgggctagcggaacgtattgcgattctgctggtcgtggcggtggtcgccggcatttcgatcggtctgctcatgccgaaggtcaacccgaccgtcggcgagatgacgggcgagtatgtggcgactggcagcgcggcggaaacattgcaatcgttgacaatcgacgaccagcccagccgggccgggtacgaccgcgattcattcggtttccggcagaccgatgacgatggcaacggttgcgatgtgcgcgaggacgtgttggtgcgcgatttgacggatgtgcggtatatagcgggttctgtttctagctctgattctggttccgggtccggcgccggctgcaaggtgaagtcgggtgtgctgtccgacccgtacaccggtacgacgatccggttcacgcgcggagtgaaaacgtcgtcggcggtgcagatcgaccatgtggtggcgttggagaatgcctggcggtcgggtgcgaaccagtgggaccgtacgaagcggtaccggttcggcaacgacatgtacaacctgctggcggtggacgggcctgccaatcaggagaagggttccgcttcggccgcatactggctgccgacgaacagcgaataccggtgcgagtacgtggcccggcagatcggcgtgaaagccaagtatgggctgagcgtcaccaccaaggaaaagcgggcgatgctgtccgtgctgcatggctgcccggcgcaaagcgtgccggagcggtgaggcgcgtggcaggtggcggagcgtaggtgcgcggtgaagcgtaggtgagtggcggagtctcccgaaatgtgtcacgattcgaaatttcggctgttttttcgaatcgtgacacatttttccttccaaaaaaacaatacgggggtataaaacgacatattcccaaggaaaatgcctcaaaaacatacccccgaaccgaaagtgatgtgtcacgatccaaaattttggtctttttttcgaatcgtgacacaaaaaacaagcctcctatatcctgtgcgcaaccaaacgcatcggaatgacgcgcgacgaacacgattatcagcggctttcaaggattccagcgccgatcgccacaaaagaggcacaacaccgaggagtcgcgatcatgcggaaagcgggcggcctcacgcgcgcacccaacgaaaccgcatcagtcaagcagcctaagcttgcgggctttctgataacgcagcaccactttgcgccatggcaagggcgtggtcaccccaatcggccgaccgacgatcgaagacaacgcatgggcaacgttcatggcgaacgcggcgcgatgcaattcgtcggacaaatccagctgcgtgaccgaaaacacagtccaaccagcggccgcaagacgcgacagcttgttctgatcgcgccgatattgcgcacggtcagtacgatgatggtcaccctgatagtccaggccaaaacgatgctcggcatcgacaagatccaacgtcaccgcagcgccattcgcaaaattcacgccggggaccacacagttcggttgcataatcggcaggccataacgcacaagagtcagcctcatttcggtctccttgggggaatcgctgcctgactgcacgagcgccaacgcatccagacacttgctccggtatgggacgttctcagttttaacaaactcaatcagccccttgcgagtggcgaatcgatggcgaatcaacgactccgcaaccatgacgatgtcctggataccccaccggccggcagccaaagaccacgccggaacgggcataagcaccggaactccagcaacctcacgcacgtgtcgcgcggacaagcccttccagacatgcacggtcacatcggccgacaccgatgtgcttttcttcacacggccgcgacgagccggcgattgggcgaccgtatgaagtttcgccggggattgcgggaattgggaaggctgagaagccgactgccgaagacctggaatctgattccgagaaacagcctgggaatccgggaaatattgaaaatccgaatccgggaaatcctgccctaagcggatagagtgctcggaatggccgaaagccggactttctccactccatccatagtccacgtccgtcccagcgtaaccgccttgcgacgaacgcagcgaaacaacggagcaatcactatctgcgggcagctcgacgccccaaatcgcgagcgcggtctcgtgacttacgggatgccgcaactccacggactgggcaatgcggagaatacgccagctggcttcggacagggtcgcccgctggatcggcttgtatgcatcatcagcattcatggcgtgcaatataaacgatggcaacggtttgatgtgcgtttttccaaagttgtggtcggagaacatgcgatttggggcagttcagcatggcatggccgtaattccaacgatttggagcgcaacagcctgtggataaccaatggagatggttccagctaccaccgcagcctttacaagggacgcggcctggcacttccggaagtgcggcaaaccggtatttcttttcgcttggggaatcggggatggatcagcctcagcccagccttcaaggcaattcggaccaattcatcacgaaccagcacaaactagtctcaagcgagccttgaaccagctttggagcggaatcttccgctataaatgtgtcacgattcgaaatttcggctgttttttcgaatcgtgacacatttttccttccccaaaaacaatacgggggtataaatcggcgcatttccaaggaaaatgcctcaaaaaacatacccccgaaccgaaagcgatgtgtcacgatccaaaattttggccattttttcgaatcgtgacacaaaacaagcgacacgggcagtaccggaagagtaggtccaaggcctgctctggaaagggcggagctggcgcacagatagcgtgggcagtgccggaagagcggaatcaaggcctgcgacggaagcgaggagggcactcaggggaggagaaggcatgcggaaagcgggagcactaggcggcgcgaaaccaaacacgcgacactaggcacgggtggtggcgcgggctatgatgcgggattgggtggtgatgagctccggttccaacgtacggctgccgtcgatgcggttgatgatgcggctgaccgcggtcggcgcgatccagtcgaggcaggaatccatggtggtcagcggcggctggaaatatgcggcttcctcgttgttgtcgaagccgatcacctgcacccggtcgggcaccgcgatgccgttcgctgccaaagtgaacagtgcgcccaacgcaagctggtcgttgaacgccacgatgccatcgaaggggatgccggagtcgacgatgcgctgcgtcatgcgcgcgcccgagccgatggtccaatcctggccgacgttgggcactagccgtgtgtccaattcgacgccttggtcggcacacgcttcgaatatgcctcgcatgcgcagctgcgcgttgccttccacggcgtcgcgcagctcgaggatatgctccggatcggttcgcgagccgatcaccgcaagattcgtggcaccgtggtcgaacaggtattgcgcggcgagacgcgcctcctggacgtcgtccggggtgacatggtccgccttgccatgcgtggaccgcgcgcccacgcagaccagcggataatccacgtccaggtcctcgggatcgagatcctcgacttcggagatggacaggatcatgccgtccgacaccgtggcattgaagtttcgcaacagcgcgcgggcaccctgcgcggatccttccgcatacgtggtgatgtacacggaatagccgtagatgcgggccgcgtcgatcacccggttggccagttcggccaaatatggcgcggtcaggctcggcaccgcgagcgtgatgaagccggttttgccgcgattgagattgcgggccgacacgttgacgcggtagccgagcctgtcgatgacgtcctgcactttttcgcgtgtggcgtcggccatgcggccggaatggttgatgacgttcgacgcggttttgagggagactccggcctcttgcgccacttcacgcagtgtgacgcgtttcctgtcagacttgtccggcttcacttcggccatatctccccctaaccgcatccgtcatcgatattcgacttccgactttaccgccttaccacgagcacgccgttgcggcgcacggtgtacgagccgggcttttcctcccgatccgtctggaacaggatgaccggctcgccttcgatgccttgcaattcgaccgtcttcttgccacggggcaggtagaagtcgaaggtggcgtcggcggaggcgcgcacggtgtgcagcacgtcggcattctcctgcgacgaggccgcgagatatgcgcggaccagcttcgtcagatcggccacatccaggtcgcagccgacgaaatacgcttcgccggagccgtacggattacgggtgaccgcggccgtgccgtcgagctcccattcgtccgcttcctcgccggcgtacgtggcaagcacctgcgcgtgttcgccggtcacgttcacgtcgttctgccacaggcgggtcgtggtgccgtccagcgcggccgaatcgtcggcggacgacagtcggatctcgcccggctcgccttcggcttcggcgccgaggatgttgaattcctcgccgcggacgcccagcatcgagcgcaacaggccatcgcccgcgcccgggtatccgccgagccaagtgtggaaatgctcgtcgatcagtccggtcgcgtagccgaccaccacgcggccgccggcggccgcgaagtcggccaaccgctgcgtgtcggcggcgctcaggatcagcacggtcggcagcacgacggtcttgtacgagctccagtcgtaggcgagcggcacgatgtcggcgcgcgagcccgcgtccaggaacgcgcggtaccagtcacgcacgtcatgccagtggttgagtttcatgctcggcagggtctgggagcgggtggcccattccgattcggcgctgaagaggatcgccgtgtcggagtgcgccaattcggtaccctgcacgccggcgtcggcgagcgtgtgcaacgacgcgcccagctcgcacacctggcggaacagcttcgtgtcctcgccggcgtgcggaaccatggccgaatggaacgcttcggcaccgaacgcggacgcgcgccactggaagaagttgatggcgtcggcgcccatggccacatgggccagggagtcacgcacggtctcgcccttgcgcttgcgggtgttaagcggcttccactgcaccgccgaggtggagtgttccatgacgtaccacggcttgccgagcgcgagcgaatccatgagagcgtcggagcaggccagctcgtcgaggtgggattcgccctcgtggaagtagtggtcgttggatacgaagttcacttccttggcccaggcggcgtagtccatgcagcactggtcggtggagaccatgaagttcgtggtgaacggcttgtcggggcagatttcggcgatcgcgtcgcgttcggctttgtagaagtcgaggagcatgtcgttgccgaaccgttcgaagtcgagcttctggccggggttgaccatcgagtcggcgcccatgaaccgtgggatgagcacttcgtcgaagccgttcatctcctggccccagaaggtggtgccccacgcctggttgagcgcgccgatggtgccgtacttgcggcggcaccacgcgcggaaggcctcgagcgcgttgtcggagtagtcctcgcggttgttccacccgtattcgttgcccatgtgccatgcggtcacatacgggttggtgccgtaccgttcggcgagcttgcggcacagggtcagcgcgtattccttgaacaccgggctggtcgggctccaggattggcgcgagccggcgttgaccggatggccgtacttgtcacgcggaaggacctccgggtggctttcgtacagccacagcggcgcggtcgccgtcgcggaggccaagtcgaccacgatgccggcattgccgagtttgtcgatgatgcggtcgagccagccgaaatcccaacgatcctcggtgggttggatgcgatcccagctgaagatggcgagggccacggtgttgacgccggcctgcttcatcaggcggatgtcgtcgtcccagatgtcctcggaccattggtcgggattgtagtcgccaccgaaggcgatgccgcggccatccgcggtcagcagttccggccattcgaagttgcgtcgcgcactcacgattatctcctttggtaattggcataaagccatggttttttgtatattacattcgttatttgcccaccggcatgtggtacaccggtgtagcatacacgtcggtgacgtcagcgacgcacgcatcggactgctccaggcgggccgccatcgacgatgttaccttcacgcggaccccgcgcctcagcggcgtgacgaccagcgtcagctttccaccagcggcatcgatggcatccgcgtaatcgcgcaatccgacctgccatgtctcgccgttgcagaaattatcggcgatcagcacatcgccgcagaacagccagccgatatcgccctggtatgcgatgttcagcatgacatcggcgacctgccgttgatcgcggaaaagccgtcccatgccagccggcaaagcgatttcgtaccgatcggcgtgcagtcttctcagacgcgcatacaccgatacgggctccaccggccgcggagagccgagcaagccttccggatatgcggcgatcccgttttcggcgcggggcgattccagcgtccacccatcgccgtcctcgtacagcaacgcgttgtcgtcgtcgacgaaggcgaggcctccgtccaacaccgtcatccgcccggcgagcgctcgtgtgacgcatacgatctccgccgcgtcccggaccatgaagcgttcgaaatctgccttgccgacggtgacgtcctggatgtcgccttcgaaatggaacgtcagctcatccatgccatcgggcttgaggaacacgaacgtgcggaacggtcggcccggcacccgcagcacggtgaccggctgcaggttggcgcggacgagccgcacgccgtccagatccatgttgaacggcaatatgcagttctccccctcggcgaggccgatgccggtgaaccgtatgcgctcaccggtacccgtcgtcacgtcgatttgctcaccgtgacggctcggcacgcgcgcatggtcctggaagttgtcgatggacacgaaaccccgttcgccatcgctgcgcacggcataccggagggtctcggagtcggacggatcgatgcggtcctgcccgtcctgcaacgagaccggcattccggcgagttccggcccgaaggctttgacgaactcgtgcagggtgcgcagccgccggtaggattcccgcacctgtccgaattcgccaaggggcgcttggaaatcataggagcgtttcggggtctgcccctcattgaggaatccggccgcgcccttcgggttggttccgccatggaacatgtagtagccgaggaaatcgcaccccgagccgagcttgatgttggccatcgcgtcgacggagcgcttcggcagcacgaaacggtaatcgtacgaattgaacatcccgccgcccatctcgcagcaggcgtacgggcggctgtccggatcgtacgggggatcgaagccgtcgcttgtgctggagccatgcagcctccggtatcggtactcgtcggtggcgggatgctccgtcatcccctcggcaccgacgccgtcgtagaacagccacggccggtacgcgtatccaccccacagcggcagcatgtcgtccggaaccggtgactgccagccggtgcaggtgaacatcggcgggtcgatgccttcctcgatcgcgatgtcgcgcagccgttccaggtagccggccccatcgtggccggacggcacccattcacggctgatgccggtggtcatctcccaaggagccgacgacgccatgtactcgttgtcgacctgggccgcgatgatcggcccgccatccttgaaatacaggccgcgcagctgctgcgcgatatgcgcgtagagaccgcgcaccgcatcgaggaagccggcgtcgagggaacggacctcatacgacttgccgtacagccagtcgggaagtccgccgttgcgcacctcgccatggcagaacggtcccagccgcacgatgacgtgcagtccgtgccgggcgcacaattccacgaatcggcgcacgttcctgttgccggagaaatcccactccccctcgcgctcctcatggtggttccagaacacgtaggtggatacgacgtcgatgcccgccgcggccatcttcgcgagttccgtgtcccaccgttcggcggcgatccgcgaatagtgcatctcgccggcgatggggatccatggcgatccgtcacgggtcaggaagcggttcgtggcgcccagggtcccgccatccggcccgcatgcggctgcggcgcggatgacggggatcccgtatgcgggcgtccgcgcgaacttgctggcttccgaaagatcaacctcatagcgcataacgctgctccttgtcgaattcccgcaagcaggaggaccggtcagcccttgaccgaaccggcgaccaggccggccacgatccaacgctggcagaagatgaagaacacgaacaccgggatgagcgcgatggtggtgaccgtcatgaacaacggccagttcgtcgtgaaggtgctgatcgcgttgaacacctgcagcacgatggtctgtttgttggtcgacgagatgtacacgctcggcgtcatgaagtcgttccacgtgcccatggtctggaacacgatgacggtggtcaggatcgggcggatcagcggcagcacgatcgtccagaagatgcggaacggaccggcgccgtcgatacgggcggcctcgatgatctcatacggcaggccgcgcatgtactgcacgatcaagaagtagcagaaggtcgcgccgcccgtgtaaagcacgatcaggccgagcagcgaatcgacgagacccacctgtgcctccatgcggtactgcggaatcagcagcgtctggccggggatgatgaaggacagcatgagcagcacgccgatcacggcggtgaacttgctcttcttcaggatcatgccgtatgcggcgagcgcgccgaacagcacctgcaggccgacgccgaccaccgtcacgatgatggtgttcttgaaggcgttgacaatgggcagatgcccgaatgcatacgtgtagttctcgaaattccatgtctttggtaacccaatcgggtccatggacatctcggcgctgcttttgaacgtgttgatgacgatgacgtacagcggcaccgcgcagatcagcgcgatagcgatgacgacgacggaacggatgatcgagccgatacgctcgcgttgctgcagagtcatgacagcctcttttctaccagattggtgattacctgctgcagggcgaccaacagcgcgcagcagatgaagaagatgacgcccagtgcggagcccagtccgtaccggctcgaaccgatgcccgtgaggatgatggactgggtcacggtgtaggtggagtagcccggaccgccgctggtgaggccatacggcagatcatagaccttcaaaccaccggtaagcagcatgaagatgctcacacccatggccggaaccatctggggcagtgtgatgttgaagaactgctggcgacggtttgcgccatcgacggcggcctgttcgtagatatcggcggggatagcctgcagatacgccagatacagcgtggcgtgccagccgatctgagcccataccgctacgaaaatcacacagaatttggcaagttcggaattcgacaaccacggaatcgcatcgatgccgatcttggcgagcagcgtgttgacgacgccggacttcagcggggagaagatgtactgccagaccaagccgagcacggccatggacggcaccgagaagaagaagaacagggaacgggcgaagttacggccgaagaacttgcggttgagcaccacagccagcggcagggcgatcacggtgatgagcacggtggtggccaccgtgtacagcagcgtgaagccgaggcccgcgagcagcgtcggatccttgaagcactgcacgtagttcgcgaaccccacgaacttcgcgtccgcgaaattgtaaccggagtaatcggtgaagctgaacaccaggctttgcaggaatgggatgaggatcaccacgatgaacaccaccatgatcggcagcaggaagcgtgccgaggcgaagttctccatgaagttgcggtgacgacgctgcttgagatgcaacgcctctacctgatcagcggaatgtggacgcgccgctgacgctgttgatactgacatgttggttgctttctacaaaacgtgagattggcaggtccaggcgtggcgcggacggaagggtccgcgccagcctgccgcgatggatgtctgttcgcgatggatcaggagagggtcttgagcttggaatcgaggttctccgcggcctgcgtagggctgatggagccgagggctacctgctgcagctgggtgaaggtctcggcgcgcagcgcggtggtgcccttgctccagtgggcggaattcaggtacacgttgccggtcttgatgtacaggtcgtaggcgtccttgaagtggtcgtccaccgtggcgttgaagcccttgacggacgggatcaggcccagctgcttctggtacagcttgaggccctcgtcggaggtcaggaaggtgaagaacttctccgcggccttgagcttgtctccggagatcttgttgttgatgccgaaggccggatcgatggagcccggcgcgtacggggtgtcacccttcttcagcatagggatctggccgaaaccgtagttgaggccggtctcattgaagctgtcgatgtcccacgagccggaaggatagaccgcaagacgtccggcggtgaattccgacttgacctggtcgccgctcaggccggacacgtcggagctcatcaggttctgcttgatcagcttgtcccattcgccgtagtacttgccatacacgttcttgaacgtgtccttaccggcgtcgatcttggcgtcgagcgcctcgccctgcttggcggattcagcgccgatccagccctcgacggcgttgcccagtccatccttcggctcaaggtatggggtgattcccgcggctttgagtttgccgcacatggtcaggaattcatcccacgtcgccgggatggagtcgtaaccgaccttcttcagcagatccttgttgtacacccaggcattggtccaggtgctcacgcccatggcgtatactttgccatccacgctataggccttttttgcggcatcgccgattttatccatgaagctttcattgctcaggtccttggcgtagttgcctttgaccagatcgctcaacgcctccggaggaacgatgtagacgtcggccaggtttccgccggagattcgagtctgcagcgtctgctggtagccactctgggaaccggtggtggtgctgtagtcgatcttgatgtccggattggccttttcgaacgcgtcgatgatcggctggtacttgtcctgcgaattgttcgagaagaacgacagcgtggtcttgccgtcggcggcgtttcctccaccgcacgcggccagcggaacaagcatcgccgcagcggccaccgccgcaatcatcctgatggatttcttctccatgatgtactcctccttgtgttccatcgttggcaaccgctttacgtgcgttcattcgtcgaacccactccagctgcggtagatacacgtcaatatgtcttcaactgaccattcagttgattcgggatatttccttccctttttggtataactgtgtacctgttgaaacagtataggttttccggtgtaccatgtcaattcaaacaaggaaatttgcatcccatcgaccgctacccctacaaaacatcggcgtgtcgtataccggcagcaccgtcgacagcggacgacgacccgcccgcaccatccggagacgcgcagcccgaaagcgtattgcgggtgggcaggacgcatgtggacaagtcggtgtattacgggggattatttttccgatgaattccccagtattagttgggattgaaaagatgctgaaagtccacagataaaaaatcggcggccccaaggaaatatccttggaagccgccgatatgcttgcgtgcgtcgcgctacgggctcaagcgagtacacagcgtgctacgcagaccgtgagcaacacagaccgcgcgctacacagaatcgcaagctacaaactcaggaacagctcgtggatgcgggtgtcgtcggtgagctcgggatggaacgccgtggcgaggatcttgccttggcgcaagccgaccacattgccgtccaccgacgtttcgacggtggcggccggtccgacttcggccacgaacggcccgcggatgaacaccagcgggaaatctttgagcacgatgtcggccggggcgtcctgcggaacatgctcgcccggtgcgaccacgacggcggaatcaccggaagaggagccgaaatcggcggtggcggcgaacgagccaagctggcggccgtatgcgttgcgccgcacgacggcgtcaagcgcgccgaagtagacgttgtcgtcgttatcgagcttgcgggccagcagaatcatgccggcgcaggtaccgaacaccggtttgccggcggcgatatgctctgcaatcggctcgaacaggccggtggagcgcagcagcttgccctgcgtggtgctctcgccgccaggcagaatcacgcgatcaattgaatcgtcgaaatcctcggcggcacgcagcagtttccacggcgcgccaagacgatccagcatggccgcatgctcggcgaacgcgccctgcaccgccagaatgccggtcacgccgtgcttcgcggatgccgagcctgcggcgacgtcggccgactcttcctttgaaatgtattcaactgctacaaccaacggatgctcctcattcaggttgttcaacaaatcgttcggtgaatcgccgaacatcacaacaaaaagcggcaggcacgtgcagcaccgaaaatcacacgcacccaccgagtccttcaaagtcgatcacacgaccggcttatgcaatcctcgcggaattgcaagcaatcaagcaatcgacgaatcaacagatcactcgccacgggcggccatgatggtttcgatttcgtcctcgttgatgccgaccatggcctcgccgaggttctcggacagacgtgcgagcaggtcggcgtcctgccagttggcggtggcctgcacgatggcggccgcacgcttggccgggtcgcccgacttgaagatgccggaaccgacgaacacgccttccgcaccgagttccatcatgagggctgcgtcggccggggtggccacaccgccggcggcgaagttgacgaccggcagacggccgttgtcgtgcacatacttggcgaggtcgtacggcacggccagctgcttggcggcctcgtacacctcatcgtcgcgcagggagacaagttcgcggatctgcttgttcatggtgcgcatgtggcgcacggcctggatgacgtcgccagtgcccggctcgcccttggtacgaatcatggacgcgccctcggcgatacggcgcagcgcttcgccgaggttcttcgcgccgcacacgaacggcacgtcgaactggttcttgtcgatgtggtacacgtcgtcggcggggctgagcacttcggattcgtcaatgtagtcgatttcgatggcctgcagaatgcgggcttcggcaacatggccgatgcgcaccttggccatgaccgggatggacacggcttcctggatgcccttgatcatggccgggtcgctcatgcgggagacgccaccggccgcgcggatgtcggccgggatgcgctcgagcgccatcaccgcgcatgcgccggcgtcctgcgcgatcctcgcctgctcgggggtggtgacgtccatgatcacgccacccttgagcatctgcgccagattcttattcagttcgttcctgttgttggccatcgccagcctttcgtcgaattttttagatactaacgattttccatttcgatttcacgcgaactgaatcttataacctaccaaaaagtcggttttgctaaatttgcaaccttattttcatgattgtttcatttccctatgatttcgattccgtcgacatttcgtcggtttcgtccgtttttcttgctttacctgcgaccatggctttcgattcgtccgcttccgtacgccgtcgcgcgcgctataggaaacacgaatgacatgcgattttcattcgaccacattgcggacgtgcggcgcgtccgtatgcggccgcatgggcatgggcacctcaccaggccccgcattacgccgattcacacactagttcgcacgcatcggctcgccgcatcagttcgcaatccgcacgcgccagctcacatgcgcacgatgcggtccgcgatacgcatggtggaatcgcggtgcgagacgagcagcaccgcgctcccctgctgcgccaacgcgtcaatcgattgcagaatcacggattcgttgtaggcgtcgaggcgactcgtcggctcgtcgaacaacaccagcgacgcgttgcgcaggaagacgcgagccaggccgatgcgttgccgttcaccttctgaaagccgcccgcccaactcgccgacgggggtatcaaggccctgcgggagcgagtcgaccagttcaagcgcggaagccttggcgagcgcggcgcgcagcacgtcatcactgacagaaaggggcgtccgggtggaaagcgcggaatcagcggcattccacgaaacgggaggagcgggcggggtaagaagcgctctgccggaagtcgcggaatcgtccggatcgccagcattatcagccctatccgcaccgcccatatcgcaggccatgagcaggttttcacggatagtgccgtcgaacaggtaggtttcctgccccatcatcgtttgcacgcgacggcgatgatgcgcgtcgatctgcggcagtggcacctcggacagtgcgactaagccggattgcgggtcccagtaacgcatgagcagtttcagcagggtcgatttgccgcggccggacgggccttggacgccgaggatgccgtgttgtggtatgtcgagcgagacgtggttgaggattggctcggcggatgactcgggggcatccgcatcgcttccggaagttggagcctcgcccgaattgccgtagccgaacgtgacgtcgtgcatggacatgccatggtagcgcggcaggaaatcgccccgctcctccactgcgggggtttcgtccatcagcgcgaacaggcggcgggcggctgcaaacgtttgcgtgagattggccggcagcgcgctcaacgcgagcgtcggaccgaacgagctggccagcagcacgaaagcggcggtcaggcgggcggcgggcgcggaaaggacggtctggatggtcgcagcggcagcggaagcggcggaagcgatcggcatcgtcgtaccggacgtgaccatcgccagcaatgccgcgatggcagtgaacagtacgaccagcaccgcgccgaagcctgcgaaatcgccattcttggcactcagccgggcgcggcggctccagagcgagcgcgtgcgtgacgcgatgccggcaagccgcgcatggccttggccgaatcggatgatttcgtcgagaccgcgcatatcgtcgagcatttcgtcatcaagttgggcggattcgcggcgaatatccccaccgagaccgcctaccgccgtggcgaagagtttcggcagcacgatgccgacggtcaggtgcgcgatgaccagcgtgacagcgatcgcaggactcagcgtaagcaatgcgaccgcgtaaagcacggtggtcgcgatggcgatgacaaccggcgaaatggtgtgcgcgaagaagatttccagcagttcgacgtcggtggtgaccagcgcgatcaggtcgcctttgcctttgccggacagtttggcgggcgcgaggcgacgcagcgcggcaaacgttttcgaccggaacagcgcgagcaggcggaaggcgacattgtggttcatgtactgttcggcgtagcgcatgccgccgcggatcagtgcgcagataatcatggctgcgattgccgcaggaaggctgagattccagacttttgcgccagctgcggcgaacagcgcggcgacgccgaaaaccggcaggaacgtggcggcgaggtggccgaggatgccgcacgcgcaggcgatggccatgggtttgcgcagtgggccgacttcgcgcagcaagcgggcgatgacttgggttgttggcatgtccgatttggcgccactggcgttcgattcggcggaaccagacatccgagacacggcaaacgcaccagacgcatgagtcatacgcgatacgcgcggcgcgacgcgaccagacaatcccacccgttccacgctttcctgcgcccggaacagcttggcatacgtgccgtccgcggccatgagatcgtcatgcgcgccctgctcgacgacgacacccccatcaaacactacgacatggtccgcgtcggccgcgttcgccatgcggtgcgtgaccatcagcacggttgcgccggcgtcggcgagcgcgcgaatcgtttgcaaaatcaacgtttcgctgtccgcgtcgacgctgctggtcgcctcgtcgaaaatatagacggccgacctgcgcaacagtacacgggcgatcgcaatgcgctgtttctgcccgccggacagattcgcgccgtcctgcgtgatcggcatatcgagtcctcgcgattgcgcgcgcacgaaatcgtcgatatgcgcggcttccagcgtctgccacagctcgttgtcggtggcgtcggcgcgggccatgagcaggttgtcgcgcagggtgccggcgaacaggtggctgtgcgcggagacgatggagatttcgcgggtgagcgatgctgcggtgaggtcgcggatttggtgcgatttcagggtttcactgtcatccggcgccgcactgcttaacatagcgcccagcacttcgtcctgcattccggatggcatttcggacagcagcacatcgccttcatatccgacaagcgtgccggcaagcagctggacggctgtggacttgccggaaccggatggcccgacgatcgcagtgacttcgccgggcagcgcacggagggccacgttgcgcaaggcgtagcgcgtttcgcgcgcgtcacccgcgccgccgccctcatcaacgctgtccacatccgcgttccgcatatcggaatgcgatgtggacgatatacgacggggactcgcaacaccggcacccgcagacccggcagcgtcaggccccgcaccagcagcacccccagcatccacatccgcgtccgcataccggtacgaaacaccacgaaactccacgccgacaccacgcccggaagccccgaattccggcagttccttgctgccatgctccggttcgggcgcgtcgagcagcgcgaaaatacgtttcgtggacgtcatgccgttcatcgcaacgtggaaatacgagccgagctgtcgcagcggaatgaagaaatcggcggctagcagaatcgtcagcaataccgcggcgatcggcgtcaaaccaagcggcagcacgccggacagcgcgaaaacgccagacggcgagagcgagccggatacgaatcgccataccgcaacgccgatgccggcggccgcgccaccgtacgccacggcatccatcgccgtgagcgaacgcagttggatctgcagcacgttcatggtcatcacgcggaactgttcggccttctcgtccatgactcgtgcggcgcgctcgtccgcgtcgaaggttttcagcgtctcaagtccctgcagattgtcgaggaacgcggcgcccatatccgtgtatttgccccagtatttcttgaatacgcgggcagcacgcatcgccaccatgccgacgatgagcacgatgagcggcgcgcaggcgagcagcgtcgcggcggtgggcaggtcgatcggcgcaagcacggcgaacagcgtgatgggggcgagcacggcgtagcacagttgcggcaggaacagttcgaagaagctttggatttgttcgatgccttcgcccgcggactgcaccacgccggcggtgcgcacgcgctgcgcgtaggacgggccgagcgcgagcatcttattgaacagtttctcacgcagcgcgagtttgacgcgttcggcggcctcgctaccgaaacgtgcggcggcgcgaatggtgacgaatcgcacgaccgcggcaataagaataatggcgatgcagggcgcggtggcggacggtacgggcgcgaacagcggttgcagcatacgcaccacggccacgacgaaggcgatgttggccacgaggcccaaccattggcaggcgactttcgccgcgatcaatcgaccgacgccgtcagccaaggaaaacagccgcttgtcgaacatcatgccccttttccaatcgtttgcaataccgccatccgctccaagcgtatcgggcataccgacgaaaggcaatgacggaacggcaatcgcagaaaatcgtcggaaaaatctagaaaaccatcagaactcgcaagcaaatgcacaacagcaaaaccacagaaaaccaagggaacggcgaaaagtgaggcggctgaatgttcgccgttgagcaaacagcctaggcgcaaggggtagttgcgccaaacttgagtgtacacggaacatgttgtggttcgcaacgtcactccgcccagttttgccgcattttccaccgttttcgcccgtaagggcaacccctctcgaacccgtcgcgcaacccgttggacaccctgcgatcgaacgcgtcaaacctttttttcgagatgatgcatccgtgcaccaatcccccgttccgttgacgtttcgtgccactttgtcagtttaaacaaacccgtcgccatatttcttgttgtttcttacaatgcggacttacgtcaccgtaacttacgatatgcgaggcgcgacacaggacgcgaaaagcacgtcaccgatcaccgcaatcgcagcgatcgcatatatcgcaaaacccacgaaaaccgtggaaacgcaagaaaagagaacacttcatgctcaccgagtacacgaccccgggcgcatccgtcgaagtacgcgacgacgaatccatctactccctgcttaccgaacgcatcaagcgcaccggcgaagacaccgtgatcgcggaacgcaaaaccgctccgggccagtggaccaaggtgacgaccggcgaattccacaagaacgtgctctccgcggccaaaggcctgatcgcgttcggcatcggcaagggggatgccgtcaccctcttctccaccacccgttacgagtggggcgtgcttgatttcgcactggccgcgatcggcgcggtcaatgtgccgatctatgacaccgattccgcggctcaggccgaacgcattctcaacgattccaacgtgaagctcgccatcgccgacgatcgcgaacgcttcgaccgtcttgattccgtgattggccgctgcccgtctctgaagcatattctgatgctcgacgccaatgccatgggcgcgctggagggattgggcgtcaccgtgtccgacgaagagctggacgagcgtatcgcgtcggtgcgtgccgacgatctggccaccatcgtgtacacgtccggctccacgggggcaccgaagggtgcagagctgtcgcatcgcaatttcgtgtcgatcactcgcgccggcagccttgcgctgcacgagatgattctcgaggaccatccgcgtctgctgctgttcctgccgctcgcccactgcttcgcgcgtttcatccagtacgcgtcgatcgcttccgatgacggcgtggtcggctatctgccggacaccaagacgctgctgccggatgtgcgttcgttcgagccgacgtacctgctgggcgtgccgcgcgtgttcgagaaggtgtacaacgcggcttcccgcaaggccggcatgggttggaagggccgcctgttcctcaaggccgccgagtccgcgcgcgactggtcgcgcatgcagcaggctggcgagaaaccgaccatgaagcagaccgccgaacacctgtcgtatgaggcgtccgtataccacaccgtgcgtggcgcgttgggaccgcgtatccgttatgtggcgtgcggtggcgctccgctggatgtgtcgctcgcgcatttctttaacggcatcggcctgccgatgatccagggttacggcatgacggaaaccgcggcgccgtttgccgcgacccgcgtcacggacaatgtgatcggtaccgtcggccagcctgcgccgggatcgtccgtgcgtatttccgacgatggcgagctgcaggtcaagggaccgaacgtgttcatgggttaccacaatctgccggagaaaacggccgaggtgttcaccgaggacggttggctgcgcaccggcgatcttgcgtcgatcgacgatgagggtcgtattacgattacgggccgcaagaaggacatcatcatcaccgccggcggcaagaacgtgtcgccgattccgatggagcaggagattgcgaagtgtccgattgtggagcatgccgtggtggtgggcgataatcgtccgttcatcggcgcgctggtcacgctcgatccggaaggattggcggcctggctgccgtccgtgggcctgtccgcggatacgccgcttgaccgcgtggcggctaccgccgccgttcatgacgagattcagaagtatgtggacaaggcgaacgcgacggtttcgcgcgccgaatccgtgcgtaagttcgtggtgctggatgcgcagttcacgcaggagaacaagtgcctgacgccgtcgctgaaggtggtgcgtccggcagtgaaccgcgtgttcgccgacgtgatcgaccagcagctgtacgccggcaagcgctgagccgcacataggtaaacaaaaacagcacggcggggaacgctgcgtacaaaagtacgtcaacttccccgccgtgctgttttttaagcgcaccccgtatcgctgagataacgcgtgcggtaacagtgcggcaggaaacgccggcgtacgaaggtacgtcaagtttcctgccgtgctgttaacgctccgttatttcagtgacggttgttgaggcggtggtacatttcgctcagctccagctccttctcgaactggcgggcgttggtgttctcgtcgatgacggcgagttcgacgccggcgatgcgggcgaagtcctcccaagcctcacgaccgacggacgtggtcatgcaggtgtggtgggagccaccggcggtgatccagcactgcacggcggtcttcaggtccggcttcggcttccacacggcgcgggcgcacggcaagttcttcagggagccctgcggttcgacgatggtgacctcgtccatgagcaggcggaagcgttcgcgctcgtcggccatggagaccacgacggcgtcggccggcttgccggagaacaccagacggaccgggtcggacttgccgccgatgcccagcgggtagatggccagcttcggcttggcgatggtgccgatggacggggagacttccagcatgtgggagcccatgtcgaactcgttgcccggcacgaagttgtaggagtagtcctccatcagggaggcgccaccctcaaggccgtagcccatcacggcgccgatgcgcaccagcacggaggtcttccaatcgccttcggcggagaagccccagccgtactcggacgggaagcgctgcgggccgacgcccggcagctgcggcagggtgccgaggtcttcgaagttgtcgacgccggcggtgcaaccgttctcacgcatcatgttgaccatggcggcctcttccttggctgcgatgaacagctcatcgtagcgggaatcaagcagctcgggggccacgtcgtacttggccttgtagtcttcgatgaggtccttgacctggctgtccttgaccttctcgtaggcggcgacgaggtcgttgacggcccaggtgttgatcgaagcgccgaacacgcgttcggcttcggtcttgtcgccttcggtgacggccacgttgcgcatgttgtcgccccaacgcatgaccttcatgttctgggaggcatcccagccggcgcaggcgcgagcccaggtgccgaccttttcggcgacttccggatcggtgtagtggccgacgacgatcttgcgcggaatgccgagacgggacacgatgtagccgaactcacggtcgccgtgggcggcctggttcaggttcatgaagtccatgtcgatggtctcccacgggatttccttgtggtgctgggtggccagctgcagcagcggcttggtcagcacttcgaggccgcggatccacatcttggccggggagaaggtgtggcaccaggtgatcacgccgatgacgttcgggttggcggaggcttcggtcatgaaggtcttgacgccgtcggaggacttcagggtcggcttgagcacgatcttggccgggatcttgccggtcgcgttgaggaagtcgaccatctcgccggtctgctgggccacctggcgcagcgcctcctcgccgtagaggtcctgcgatccgacgccgaaccagatttccttgccttcaaatgggttttccattgccatgttggattattccttacttcgttgttgggtttgtcgtttcagtttccgtcgcgtcagtgctggccgtagacgttggtgtagcggtcgttaaggctatcgatgtcttcctgggagatcgggatgatgtctccgagctgcttggcggcccacatggtgtgcgccacctcttcggtcatggcggcggccttgacggcggcttccgcgtccttgccgatggtgaacggaccatggttctgcatgagcacggccggggacttcggatacttcttcagggtttcgaccacgccttcgccgatggcttcggagccgatgaggcggaacgggccgaccggcaccgggccgccgaactcgtcgcccatcatggtcaggccgcacggaatgttctggccggtggccgcccatgcggtggcgtaggtggagtgggtatgcaccacgccgtacacgtcgggcatgtggcggtagatgtacgcgtgggacgcggtgtcggagctcggcgcttcggcgccgtcgaccacgttgccgtcgaggtcgcacacgaccatcgagcttggggtgaggtactcgtagcgcagtccggacggcttgatgaccatcagatcggcggtgtgcagacgctgcgagacgttgcctgcggtccacaccaccagattccacttgatgagctgctcgtgcagggtggcgaccacttcgcgcacctgcttgacctcagctcgtacttccgggccgtaatcagccaacgttgccatattgtgttcctttcgtcaggcttgctgttgttgcgatggacggttatttggtttccagcgggatgctttcgatggcggcatgctcgatcggcagccccttgcggaagcggtcgaagaaggcttcgaagccggccacgtcgttggcgtccggcgcttccgtggtggaggccgcgtcggcgaagacgcgggcgtcgaggtagtcggcgagcggctggccggcgtgccacagatagtcggcgagcacggccatgccccacgctccgccttcggcggcggtggccatgaccttgatcggggtgtcgaatgcggcggcgaggatcttctgcgcgaccttcggcgtggtgaagatgccaccgtggccgacgagcgagtcgacggcgacgccttcgtccttggtcatcacatccatgccgatcttgaccggcgagaaggcgctgaacagctgggttctcatgaagttgccgaggctcatgcgcgcctccggactgcgggcgaacagcggtcggccttccggcaggccagccaggaattcgccggagcggaacggatagttgagcagaccaccgcagtcggcgtcgacatcgtccgcgatcgcggcgcggaacagcgtgccgtacagcgtgccggcatcgaccggttggccgatcgcggcggcgaactgtccgaacaggccgacccaggcgttgagatcggaggtgaagttgttggcgtggctcatgccggccaggtcgccggcgggggtggtgacgaggtcgacttccggatgcaggcgtgtcagcttgtgttcgagcacgaccatggcgaagatcgaggtgccggcggagacgttgccggtgcgcacgcgcacggagttggtggcgaccatgccggtgcccgcgtcgccttccggcggggcgaggacgacgcccggctgaagggtgccggtcgggtcgagcagtttggcgccttcggcggtgagcgtgccggccggggtgcccgccacgagcggacggggcagcaggttctcaagcttccacggctgcgcggcgacttcctcgatcgcgtcgaatcgcttgatgaattcggtttcgtaggtatgggtggacgggtcgatggggaacatgccggaggcgtcgcccacgccgagcaccttctcgccggtgagcttccagtgcacgtacccggcgagtgtggtgatgtagtccaccttggagacgtgctcctcgtggttgagcaccgcctggtagaggtgcgccacggaccagcgttccggaatgttgtactggaacagctcggaaagcttctcgtgggcttcgtgggtgttggtgttctgccaggtgcggaacggcacgagcagttcgccggacttgtcgaaggcgaggtagccatgcatcatggcggagaagccgatgtgccccacgtgggtcagccgttcgccataggcggtttcgacgtcgccggccatccgggcgtatgcggtctgcaaacccttccagatttcctcctgggtgtagctccacagcccgtcctcgagatggctggcccactcatagtcgcccgccgcgatggtgtggtaggcgtcatcgatgagcaccgccttgatgcgggtggagccgaactcgatgcccaggctcgtcttgcctgcgcggatcttctcggcggtcactgcgacctgctcttgcgtcatagttcacgaactccttgcgtccgagcgcctcgcaaccactctgtcaactgaatgttagcgctcactgttaacgctcactattgtaggcacaaacccgtgacgcaccaaatccgacgtgtcatcggagcaatgaatatacgagcaaatcgaaaagaagcagcgccttagcggcggcggacaggacccagggagctgcggttgaccatctgcgccgacaccagtccgacgccatgctgcgatgatccgaaggagttctcctcccccgcgcccagcaagtacagcgtctcacgcatggcggcgacacccagctgctcgaagccgggacggaccgtggtcagcggcgggaacatattgtccatggcaggcatgtcgtcgaaacccaccaggctcacatcctgcggaacgcgcacgccatgctcatgcagcgcgcgggccacacccacggcctggctgtcgttggcgcagaccatgcatgtcggcagattgccgccggtgcggccgatgttgtcgaggatgtggttcatcttgccgtacgcttcggaggattcccaggtctcgcactgcaccgtcacggaattgaccgcattggccgcgcatagcttgttccatgccagcaggcgcgtcgccgcgtcgcgccactccttgggaccggcgaaatacagcaccgaacggtgcccgtattccacgacgagatgcatcacgtcggccatcgcggaccattggtccatgccgacgacggatacgcggcggcggtcggcggacttcatcagccgcaggccgtcctgcacgccgatgccaccgtgcgtggatgtgacgatcacacgaggctgcgcgatccgcgtccggcatgccgcggagaacatgacatcggtgggcgtgaggaagatgaacgcatcgacgttcatctcgtcgaaggtgcggcacaggtcgtcgaattcctcctgcgagcacagcgcctcatgcaccatgctcaccgtcacgaacaggccatgctggcgggccatcgtctcaatcgcggaaatcgtggagatcgggccatagaaatgctggccgccggcgatcaggccgatggtgcgggaccggtgcgaggcgagcgcgcgggcggagttgctgggacggtatccaagctggtcgatggccctctgcaccttctcacgggtggcgtcggagacgtccggcgaatggttgatgacgcgcgagaccgtctggtggctcacaccagccagcttcgccacttcgaacatcgaaggacgcttattgcccgcattgcgtttgcctgccatgccccgtcgcctttcgcacacaactgttggtatgttcgcctattgtacacgcaacttcagttagcgctaacaaccctcatgctccaaggatgcggcacactgcgcgcaggctaccgcacggccgccaaagcacgcagacgcgccgcgaagttgggccaatcggtgcgcatggcggtcagcagcttgcggttgggcacgtcatcgaccggcacccattcgatctccatgctttcgtcgtcgttggccttgggctcgacacgatgccccggcttttcgaaggcgaacaccgtggtatacgaccatgggccgtggtcctcgcagtatgagccgaccacgtcgatgtcctccggcgtgatgttggcttcctcgtacgattcacgcaacgcgccctcgatcgggctttcgccgtcggcggtggcaccgccgggaatgccccacgtgccgccttccgcgctccataccgcgcggtgctgcatgacgacgtgcgtcacctcaccggtcgtctcgctgcggcgggccaagagcacgccggacgcgccgttcgtaccccaatgcttgcgaccgcaggcgcaatcgacccagccgtctcccggctggtgcacgttctccttgggcggcagcggcttcgcggcacccgttttcgcatcatattcggcgtccggcgcaaggtcggagcgggtgacgttccacaggtcggtccattcgacgcccaattgcgccgccagacggcgcaccaacggcaggctcaggccgatgatgccgtgcggatcgccttcgatcgagtcgatgaacgcgccgccgaaaccttccaaagtgaacgatccggccacttccagcggctcgccggtggcgatgtagcgttcgatatccaggtcggaatattcgcagaagtgcagggtcgctttgctggcgccgcgcaccatgcggcccgacgcgaagtcgatgaggcaatggccggtccacagctcgccggtggcaccgcgcatggcacgcagccgttcgcgcgctacctcttcgctatgcggcttgccgtagcattcgccgtccagcaggaacatggaatcgcagccgagaatcagcgggccggccttcgaacgggtcaggcttggacggccatccacgaaatcggcgatcggctcggcgacggtgggaatggcgatgccggagaaatcgcgggtcttcgtctcgtcggcggactgcgcgctgtccgtgcgtgcggctgtgcccgccgaggatgcgtcgcgatcgtctgctgcccggagcgggaagccgaccacgcgctccccgcgcgcgtgcgccgcggtatcggcgatgttgcgatacgcctggtgcacggcctcggccttcgccgtggcgagaatcatcacacgccgttcgacgctcaggtcgttcacggtgacgccaagcgcggccgcctcgcgttcgagcgcggcaggctcgtcgacgtgcgagacacggatggtcgggcagatgccggcggagaacagcacgtcacggcgtggacgggactgggaggctagaatcagcgggatgctcatgcgcgttccacctgcacacccttggtgtcgaccgcgagatgcagcacacgccaatggccggatgccagctcttcggcggcgatccgttcgagttcctcgtgggcgtcgccatggtgcagcacaagcacgcatgggccggcgccggacacggtggaggcgaagccgtgggagcgcatcttctcgatcagcgcccaggacggctccatcagcgaggcgcggtacggctgatgcaggcggtcctgcgtggccgcgaacagcagtgcgttggcgttctgacgcgagccggaggccagcatcgcggggttcatggcggccggcagtaggctcacacgggagacgttgtgcacggcgtccttgaacggaatctcagtcggcaacgcctgacgggccttttcggtggacagctcgtagtccggcacgaacacggccgcggtcagatcgtccgccacgcggtaattgatggtatggaagccgttgtgcatcggctcgccgcctggaatcggcacggatccgacaccttccgcggtctccatgtcccaggacatggtcaggccgccgtacacggccggggccacgttgtccggatggccttcgatggcggcggccagctcgaacacggcgtcgcggttgaggtcgtcgtcctgcgcgaaggctgccgcggcggcgatgccggcgacgatggcctcggcggaggagcccatgcctcgcgcctgcgggatgttgttgtgcgcctgcaggatgaatccgacgcgtcccaggccgaaggtctggcatgcgcggcggaacgtggagaccaccaggtgcgtctcgtcacgtggcagggtgtcctcgccctcgccttcgatcatcacctgcgccgcggtgttcaccgggtcggcgctcagcgtgaattcaagctcgtcatgatagtccaaggccaaaccgaccgtatcgaaaccggagccaagattggcgctggtggccggaaccttcacacgcaccttgcgggtaactggagtcatctctcgtcgtccttcgtcacatcttcattacaaatcaagcaccgtataccgtggcagtgccagagtcaaatttcagggggaaccgcacccgtgcatcgtattcgggcccatgacggcggcttggcatggcttgcatgtcaatcgcatcatgggcccgaatcgcatccgatatcagttcagcacgcgcaggatcgacggctctccgcacacgcaatccagctcgcacacgtccttgacggtttcgcgcagggtgagctcgtcggtcatgtgggtgaccagacgcagctgctgcagctcgccgtcatagcccggatccttcagcgtcggcttcagatcctggttcacgccgttgatggacacgccatggtcggcgaacttggctgcgatcgcggcgagcacgcccggattgtcgtgaatcacgaaacggaccgcgaactcggccttggacgcctcgatcggagccttcttcagatccttgtacagcgggatggacggaccggtgcagccctgtgcgatatggcgggcttcggtcacgacgtctccgacgaccgcggaggcggtcggagcgccgccggcgccgcggccgtagaacatgaggtcgtccgcggcttcggccttgacgaacacggcgttgaaggagccgtgcacggaggccagcggatgggtgttggagatcagtgccgggtagacgcgcgcggacacgccggcatcggtgttctccacgacggcgagcagcttgatcaccttgttttccgcggtggcggcggcgatgtcgtcggcggtgatcttggtgatgccctcgacggagacgtcgtcgatggtgacggaggtgtggaagccgagggtggccatgatcgcggccttgttggccgcgtcgtagccctcgatgtcgccggtcggatcggcttcggcgtagcccttagcctgcgcgtccttgagcacgtcatcgaagtcgaggcccttggtggtcatctcgtcgaggatgtagttggtggtgccgttgacgatgccgagcatgctcgtcaccttgtctccgacgagggattcgcgcagcggcttgaggaacgggatggcgccgcccacggaggcttcgaagtagatgtcgacgcccttggcttcggcggccgcgtagatctccggaccatacttggccagcagcgccttgttggcggtgaccacggaggcgccggattcgatggcggcgagcacgaacttgcgtgccacgccggtgccgccgatcagctcgatgacgatgtcggaattggtggccacgctcatggtgtcggtggtcacgatggccttgtcgatccacgggaacggatcggtttccaccgggtcgaggcaggcgacgccggtcagctcgatcggtcgtccgatacgtgcggcaagctcgtccttctgctcgaccagcaggcgtgcggtctgggaaccaacggtacctgcgcccagcaatccaacgcgaatcggcgcaacatcttcctgtgccaaggcatcctcccttgaatgtgaagtattggtgtgaccttgcttattgtacggtctcaatatgacgtaaggccgcggaatatcaagaaaatggacggtttccgaagctttccccgcaaggaagcccgaaaaccgtccataccgtgagacgcaatcgtggactattcgctgacgtcccagctcagcagatcgtcgatcgtctgccggcggatcatgacgtgtgcgccggcctcgccgacgccgaccacggcgggaatcagcgcctggttgtagttgctggccatcgtgcggccgtatgcgccggtgaccggcaccgcgaggatgtcgccacgcttgatgtcggcgggcagccgcacctcgttgacgacgatatctcccgattcgcagtgcatgccgaccacgcggcacagcttggtctgctcgcttcccttgcggttggccagacgcgcggtgtagtcggagccgtacagcgccggacgaatgttatcgctcatgccgccatccacggacacgtacacacgttccgtcaccggattgcctgacttgtctttcgcctcgccggaaagctcgaccggcttgacggtgcccacgcggtacagcgtgacgccggtgggggccaccgtccagcggcccggctcgaaggagatgaccggggccggcatgccgagcgcgcggttcacggtgctgaccgcgtcggcgagcctgccgagctccacgtcgatgtccatggaatcctcgccgtcggtgtaggccacggaataaccgccgcccagatcgacctccggcagggtgtacgcatcggtggcgtagaaggtcttgcgcagcagcatcatgcgcttggccgcctgaatgaaggcgtccgcgtcatggatgttggagccgatatgcgagtgcacgccgaccagttcgagcacgtcctggcggcggtagatgtccttgagcacggcgagcgccggaccgtcggccaccatggtcatggcttcggcgagcttgcggtcgccttcggagaccttctcgtggctcaaatcgtacgggtatttgatgtcgtactgcagctcgcgttgcgcatggacttcggaggcgtgttcgccgagtcgtgcattcgagccggcgggcgtcacgtcggtgaggtcgtcgagcacgccgagtttgccggcgtcggctccggcgggcagcagggccacgccgaacttctggtcctcgtgggcggtggacacgaattcgtggccgccggcgtggatgccggaggtgacgcgcagcatgacgcgggcgcgcttgccgagccgcttggcgatcgcggcgatgcgtgccggctcatccggctcgtcgatcacgattttgttgaagccctgttcgatggccagctcgatttccgcatcggacttgttgttgccgtgcagcacgaggcggcggcctgggacgcccgcggcgagcgcgatgcgcatctcacccatggtgcaggtgtcgatgagcatgccggattcggtgacgatgcggcagatttccttgctcagcagcgctttgccggcgaagctgacgtgggtgacggtgttgttgaacgcgtgggacgcggcatgcacgaatttcgtggcgcgggcgcgcacgtcatcggtgtcgatgacgtagagcggagatccgaattcgtcgagcaggcttgcggcggtacgaccgtggaaggtgatctcgccttcgtcgttcacggccgagccggccggccagattgggcttacaggcatggtttgcgtatctccctttttcgtggattcgcttcacatcttgtccggagcggtgacgccgagcaggtcgaggccttcggcgatgaccgtcttgacggcgtcgttgagcttgagtcgcgcggcggcgcgggccggttccggagccttggcgatgcggatggcgtcggcctgttccccgcgggcctccggatcggtgagttccatcggcacgacgcgctccacgttgtaccacttgtggtaggtggcggcgaggtcctccaggtagtgggccacgcggtgcggggcgcgcaggtcgcccgcttcgcgcagcagggccggccactgggcgagcgcggcgagcacttcgccgtcggcggtggtgtcgagcaggctcacgtcggcgccttcgtaggtgatgccggcggcggccgcgttgcggtccacgttgcaggagcgggcgtgcgcgtactgcacgtagtacaccggattctcgttggaatgcgaggacagcaggttcaggtcgatgtccaccggggagttgtagtcggtgcgggccagcgaatagcgggaggcgtccacgccgatggcgtcggtcaggtcgtcgatggtgacgacgttgccggcgcgcttcgacatgcgcacggccttgccgtccttcatgacgttgacgagctggccgatgaggatctgcatgttctcgcccggcttgtcaccgaaggcctcgcacatggccatcatgcggccgatgtagccgtggtggtcggcgccgagcatgtaaatcgccacgtcggccgggttggtctcgcggtggcgcttgttgcggtagtaggcgatgtcggcggcgaagtacgcgtagttgccgtcggacttgatgatcacgcggtccttgtcgtcaccgtgcttggtggattcgaaccaggtggcgccgtccttttcgtaaatgtcgccgcgggcgcgcagatcggcgatggcctggtccacttcgccgtcggaatacaggctgttctcgtggaaccacacgtcgaaattgacgcggaagttcttcatggaacgctggatttcgtcgaacatcatcggcacggcgcgcttgcggaactcctcgcgctgttcggaatcgccttcgccgagcgggttgccgtcctggtcggcgccgccgtcgacgcgcggcaggctcagcacgtccacgccgtccgcgttggcttcgtcgatgacacgcttggcgatttcgtcgatgtacgcgcccttgtagccgtcgatcggggtttcctcgccgtgggccgcggcgacgagcgacttggcgaagcggttgatctgctcgccgtggtcgttgaagtagtattcgcgcaccaccttggcgccgttggcctcaagcacgcgggccatggagtcgccgacggccgcccaacgggtgccgccgatgtggatcgggccggtcgggttggcggatacgaattcgaggttcagggtcttgccggacaggtggtcgttcttaccgtagtcgctgccggcttcgagcacggtgtccaccactgcggccgcggatgcggagtcgagcgtgatattgatgaagccggggccggccacttccacggacttgatgccgtcggcattggtcagttcggcggcgaacagttcggcgagatcacgcggcttcatgccggccttcttggccagctgcatggccgcgttggacgcccaatcgccatgtgcgcggtccttcgggcgcatcacggcgaacttggcctgcggcggaatcagatcggcggtcagggtgcctgccttgccttcggagacaagggtgttggcaatgttgaaaatcagttcactaagggcttctggactcattcttccaagaataccgggcacgctgacagaatcagtcttcctgtccatcctcacgatggggttgcgatacgtcctgcggaacgctttgcaaggcgttctgagcatcgtcctgcccgccatgccgtttcgtacgccacgccacggacgcgtagtagcccgtgtagcacagcgccacgaacggaatcatgtacagcagcgtggagcgctgcgacggatcgcaaatcaccagaaccagcgcgccgacgcacatcacaatcgcgacgatcggcacgaacgggtagccaggcgcgcggtacttgagctcgccaaccgtatgtccctgcgcgagccattggtggcggaatcgcaagtggcagacggaaaccgacgcccacaccaccagtgtggccagaccggaaaccgcgaccagcgcgaggtagacggtcgaagcggccaccacggaggacagcagcgccagcagcgagccggccatgctgaacatcaccgcgaaaacgggcacgccgtggaagttcgttttggcgagcttgcgcggaatcataccctcctgcgcgagcgaccacaccatgcgcgagcacacgtacaggccggaattcgcggcggacagcacggccgtcagcaccacgaaattcatgatgtcgccggcgaacggcatgccgatcgactggaacacgagcacgaacgggctggtgtcgacgcccgacttgcgccacggaatcagcgccgccatgacggcgatcgagccgatgaagaagatcgccagacgcagcacggtggtgtgcacggccttcggaatcgccttggacgggtccttcgtctcgcccgccgcgacgccgaccacttcggtgccggagaaggcgaacacgaccgtcagcagcgtggagaagatcggcagcacgccgttgggcagccagccgtcgctgtagaagttctcgaacatcggcgcatggctatagccggcaattggaatcgcgccgaacatggcgagcaggccgatgataatgaacgcgatgatggcgaacaccttgatggacgcgaaccagaattccgattcgccgtacaggcgcaccgacaggatgttgagcaggaacacgaccacgatgaacgcggccgaccagatccatgcgggcgaatgcgggaaccagcgttgcatcagcaggcccgcggcggtgaattcggaggcgagcgccaccgcccaattcagccagtagagcacggcgatggtgaacgcggtgccggggccgatgaaacgcttcgcgtacaggtggaagctgccggcgtacggcatggccacagacagctcgccgaggctcagcatgatgaagtagacgagcagcgaaccgatggcgtacgcgatgatcgcgccgagcgggcccgcctgatggatggtgtagccggagcttaaaaacaggcctgtgccgatcacgccgccgagcgagatcatggtcaggtggcgcgtttccatcttgcgttccaggccgccctgttcgatgtcgggcttttcttgcgattgcgccatgcttgcttccggctcctcttacgtttggttgggtacggcacatagtttggctggccgcacaatcgcaaatactatacgtcagattcacggcaacgtgcgatggtcgtccatagttcgcggaagtgtgcagaagcccgcggaagtccgtaaaaaagcgtcagcccgcatgctggaaaagcgtgcgggccgtttgatcgcaggtagcggtaggcaatcgcagtaatcgcaatgcttgcgatacctacgaaacgtgcgaaatgctcagagcgcggcgatggcgtcgatctcgacgagcgcgcccttcggaatgtcgttgccgccaaaggccacgcgggccggcttgacggagccgatgaaggtctgcgcgtacacgtcgtcaacctcgtggaagtcctcgacgttcttcatgtagatggtggcgcggaccacattctcgatgccggagccggcggtgtcgaggatgtgcttgatgttcttcagcgcctgcgcggcctgctcgcccgcactctcgccggccagttcgccggtggccgggtcgatgcccagctggccggagacgaacacgaatccgttggccttcacggcctggctgtaggcgccgagtgctgccggggcttcggaggtggccactgcttccagcttttcgctcatactgttctcctttgtcgtaaggtatgttgccgcaaggtatgtaaacgcgcgccaagtatgtgccaatatgcccgtacatgcgctatttgcgtcgcacctgaaatcatacttttccgatgggtggaagcgggaaaaaccgttcacagaacgatatggccggagttggcaccacacggcgcagcaggcacgaaaacggcggaatcgcaaggaaaaccgcggaaaaatacaacaaacgagcaacaaaaaggctccagccgttcgactggagccttgcccggtgggcttgatggggatcgaacccacgaccttctgttccggagacagacgctctatccgctgagctacaaacccatgcaacgcactactgtacacggtctgcgcccgtttgcgacacgattcggcgaaaaacgtgacgcagaccttgcaatcgttgggaaagtcagtacgcgcgctcaatgcatcagagtgctcggcgcaaccagcacgcgctgcacgctcagtacatgagggtggcgaggcgacgacgtgcgcgcttcagacgctcgtcggtcggctcggggatcgtgaagtattcgagcagacgctggcgcaccggctcgatgtcggccttgtggcccgccgccacgaaatcaagcagacggtcgaacgcgtcctggatctgcccgccgatcatgtcgatgtcggcgacggcaagctgcgcgtccacatcgtccggcttgtcggcggcagcggcacgcaccacgcgcacgtccgcattggcggaacgggccagcagcagcgccttcgcacgttcgcgggcggcgcgcgtatcgttcggatcggcttccaaaaccttctcgtacgcggcggcggcaccggcgtaatcgccctgctgtgccagcatgtacgcttcctgatgttccggcggcacctgatcctgcacactgccggcggatgcggaattggccgcgtcggaatccggatcgcccgaatacggagcggtgccggtcacgccggcctgctgtgcggcggcgataagcttcggcacgaccacgtctgtgatctgctgcagttcctcgtcggacggaaggccctgcagaatcggcatcggacggccgccgatcaacgcgaacagcgccggcgcgccctgaatctggaacgcctgtgcgatggagggattggatgcgatgtcgatgcgggacagctgaatctggccgttgagcttgttcaccgcgtcacccaatgcgcgtgccatggcgaacagacggtcgtcggtcggcacccacaggaacagcagaatcgggaacgtggcggaggtctgcaccatggcctggaacgtgttctccgtggtgtcgatgacatatccgccagccgccggagcgccgcccgcctgccccggctcggccttcacctgatgcttgagcgcttccagatcaacggctcccgccaatgaaacacccggatggaacgcttgctgctctgccatacttgcctccaaaaacacgaaatcgttgctggcaccaactataggtgccaacaacgatttcccggttttcattcccacggatgcgcgataggcggaaaaccgccgacaatgcgcgtccaaggacccgtcgttttacagcgcttcgaccttcaccggctggcgttcggaaccgaccgcggtgattttctgcccggaattcgccggcggaacatacagcgcgatgacgttcacatagctcgtcttcatggtgctggtggccttgccattgccgaacagcgccttttccgcgtcagaggccggctgcgattcacggccagcgccggcggaacgcgtccattcggagttgatctgcgccaccaccagatcgccgccgtccgcggaacgcatgacgctgatggctccattgaccggttcgaaggtctgctgctgcgtgccttcgttaagctccatggccttctgcacctgggcagtcagatcggcaagcttcgatcgcagatcatcatccgcgaatttgctggcgtacttgctgttcgccccgttctgcagcaggtccgcatacgcgtccaccgccgctttcggcgtcatgaccagaccggtgtccgtaggcgttccctgcgcgctgccggttttggagatttcgaaactcggcatcttcacgccggagaacagtcgcgccacaccccacagcttgtagttctggcgtgcggaatcctgcctgaacaccagcagacgcttggactgctggtccttggttgtggacgtgatggagaacacggaccgtggccagccggcatccgtggagatcacggcctgggccagatccgtggggatggtggtcttacggtcaagattgcccgtggctttcgctacgttcagctcgctggtgcggatgtccagttccggaccttcgagaatcgtcggcaacgtatcagtgtcacggttctgattgcactggtcgagcgttttgagaatcctcgtgcggaccttttgctcctgcttggcgctcaagttcggcgcatcctgccgggtggtggctttcggggtcggcagctggccttcgcaaccgcacatgccgacggccattcccagcgcgagcatggccgcgataatcgcctgactacgcttcctcatcactggtcctcctcttggccgtcttcctgcgtttccgtctgaacctcctcttgggcaagacgagcgaaatacgcggcaagctcatcctgcgagatcacggaagtcgcctcgtcgtcaacagacgattcgcccgccgtcgattcaaatacggtcgattcggacacagtcggctggctttccgcaatcgtgttctgctggtcggcgaccaggttacgtgccacaggatcgacgatgacgggctgttgcgtttcctcgaacgacgacgtacgaccgccggtgcgatgttccgcatggcgacgcctgccgtgacgcgacctgctccgtgccctgttgctggcggcggtttcggcgttcttcacccaagccgaaacctcgttctcatcgccttcgttgacgccaacgccttcgaccatggcgaaagcgcgcttgttgcggcgcttatgcggcggcatggcgaatacggaagcggaaagcacggcgagaatcgccagcagtccgccggcaagatacaacggcatggcgaaattcggcaggttacgacggtcccaattcagagtgaccgtgtctcccttgcggttgccgaaatcaatcaacgccacaacatcctcggcgttattgctgttcgatcctttgacctgcatatcaacggcaccgtcattgcacttgatggtgcgccacatgtcggagtccttgaaagccacctggttctgggaattgtccgcggttccccgcgcggagaccttcatggtggaaagcgtcgtccaatcggacagaccggagacgcgcatgtacttgcttcccgcaatccatccggcaacatcgcgcgcggaacctatggcgatgcacacattggatttcttgtcacgggatttggccgaaatattgacgcggccgtctaccagctgcagcacgttcggatcggtgaccacgtattccgaaccgttcaccggagcggcggcggtgatctcattgtccggtttccagacggttgaattcaacacgccaaacacgacgcatgcgatggcaagcaagccgaaaataggcgtgacgatgccacgcatgatcttcgcatgccgggtagggcccgtctcgatctgcggcttctcttgttcttcctgcaatacagtcatagcttttccattctacagtgtccgtttgcacaagcctgaaaaaaacatgaaaatcatgctttgccgctatggttggccctatgcgtaaatcacttctttccaaggccgtcacggcagtctgcgcaacggtcatgtgcctgggcgtcactgcgtgcggcggtaattccagcgcgaaatccgacaagtcgaactcggattcctcctcatcttccgaaaaaatcggcatgcaccagatcgccggcgtgaccgccaagggcgagctcggcaagaagccgaccgtctcgttcaagacgccgatgacggttgaggacaacagctacgtggtgctgcagaagggcgacggagcccagatcgaggacggcgaccgcgtctgctcgcagggcatcgccatcagcgtcaaggatggttccgaactggccagcacgtgggagaagaacacccccgactgctccaccgtagtcacctcggataccagccagatgaccgagaactactacaagatcttcaagagcctcaagctcaattccaccgtggcgttcggcatgaacgactcgaattcctccggcacctcgtacctgatggtactcacgctggtgtccaagtcgaaggacctgaagaaggccaccggcgagaaggtcgcgggcgttccggccgacctgccgaaggtaacgctcgccaaggacggcaagccgtcgatcgacatgaacggctataagggttccgattccctggtttcccaggacctcatcaagggcaagggcgctgtggtcaaggatacgcagtccgtgatggcgcactacaccggctggctgctggacggcacgcagttcgattcctcgtgggaccgcggacagtcctccgccttctcgcttgacagcgtgatcaagggctggaagcagggtctggcaggccacacggtcggttcccaggtgctgctggtggtgccgccgagcctcggctacggaaacaaggatcaggagaagattccggcgaattccacgctggtcttcgtggtcgacattctcgccgcctactgatccgccgaaccgactgataggttcctccaaaaacaaaatagcctccccctcgggaggctattttcatatgcatgcaagtcctaggggaaatcgcggcaacgcgtgcggtatcgaggcgtaccgagggaaggcgtacgaaggtacgtcgaccgaggaacaacgaagataacgctccgttgccgcgatttccagagttggaaccgaaagaatcagaacaaccgtaaagaatcgtcctcagtgcccttcatctcctcataatcgagaatcaggcatttgaaaccgcggtcctgcgcgagcacgcgggcctgcggggtgatggtctgcgcggcgaagatgccgtgcacgggggccagcagcgggtcgcggttgagcagatcgcagtagcgggtgagctgttcgacgccgtcgatgccgccgttgcgcttgatttcgatggccacgtgctcgccgttgccgtcaatcgccatgatgtcgaccggtccgatggctgtcgggtattcgcggcgcacgagcttcgcgcctttgccgatgcgttcgatctgttcggccaggtacttctgcagatggtcttcgacgccgtccttgatgaggcccggatcctcgccgaggtcgtacgattcgtccgaatagatgtgctgcaacgtcacttccagcacgtcgttcgatttgtcggccgacgcgcggatcaccttttgcggcacttcagtatcaacgtcgtcatcggcgtggtcgggggtgatgtccctgatgctgcatggcgcggacatccagttgagcggcttgtatgagccgagttcggagaagatcagcaggctgttgtccgccttgatgagcagcacgcgcttggcgagcggcagggaggcgttcaatcgtccggaatattcggcagagcagtcagcaacaataattcgcacgaggcactaccctaccatgcgcgtcgccgtacgtacggcatacgtattcgcggcggcggaaagccacgtaaaagacaaaagcggcccggtaatcgcaatacaaaaacatattgcgattaccgggccaccttacgtcaagcggaaacggcttattcggcgcgcttcacgttggttccacgctcgaccgcgacggtgagcttgttcgaatcgaaggagatgaagccgtcagtcacctcgaaggagaggcgattgccttcaggatccaccacaacgatggttccttccttgatcacggtcagcacaggctcgtggtcgggcaggatgcccattccgccttcggaggcgggaatggtaacggacttcgccgtgccgtgccacacagggtggtcagcggcgacgatgttcacctgcatagtcgatccggccatcacgcaccgtattccttctgcatgtcgtgccacttcttctcgaggtcgtcgatgccgccgataccggagaatgcctgctccggaacgtcgtcatacacgccgtcgcagatgcgggtgaatgcttcgatggtctcgtccgccggaacgtaggagcccggacggccggtgaacttctcggcgacgtagaagttctgaccaaggaactgctcaatcttacgagcacggttcacagtggtcttatcttcttcgccgagctcatcgataccgatcagggcgatgatgtcctgcagctccttgttacgctgcagaatcgccttgacgcggttggcgcactcgtagtgagcctggcccacataacgcggatcaaggattcgcgaagtggagctcagcgggtcgactgccgggtagatgcccttggaggcgatgtcacgggacagctcggtggttgcatccaggtgggcgaaggtcgttgcaggagccgggtcggtgtaatcatcggccggcacgtagatggcctgcagcgaggtgatggagtggccacgggtcgacgtgatgcgctcctgcagggcacccatctcatcggccaggttcggctggtagcccactgctgacggcatacggccgagcagggtggatacctcggaaccagcctgggtgaaacggaagatgttatcgatgaacagcagcacgtcctggttctgtacgtcacggaagtactctgccatggtcagtgcggtcagcggcacgcgcagacgggtacccggctgctcatccatctggccgaagaccagtgcggtcttctcgagcacgccggcctcgtccatttcgccgatcagatcgttaccctcacgggtacgttcgccgacgcctgcgaacacggacacaccgccgtggttctgggccacacgctgaatcatttcctggatcagcacggtcttgccgacgcctgcgccaccgaacagaccgatcttgccaccctgcacatacggggtcagcagatcgatgaccttgataccggtttcgaacatctgggtcttggactccagctggtcgaatgccggcgggttacggtggataggccaacgttcggtaaccttaacggtctcgtcggccttcttgttgaggatgttgccggacacgtcgaatacgtggcccttggtgacatcgccaaccggcacggagatcgggccgccggtgtcatacacggtggcgccacgcacgaggccatcggtcggcttcagagcgacggtacgcacggtggaatcgccaagatgctgttcaacctcaagggtgatcttcttggtggtctcgccctcttcgtggacaccggtgttggccagttcaacggtaagtgcattgtaaatgtcgggcaggtggcccaccgggaattcgacgtcgataaccgaaccctggatacgcgtaacgcgtccagcggtcggctctgcagccgtctcgggagccgctgtggtctgattgtcagccatatgcgttcctactcttccttcttgttcagcgcatcagcgctgccgatgatttcggtaagttcctgggtaatcgatgcctgacgcgaagcgttgagcttgcgagtcagttcatcgatcaggctgcgggcgttgtctgtagccgtgtgcatggcgttctgtcggcttgcagtctcggatgccgctgcggtgagcaggcattcatggatacgggactggatgtacttcggcagaatcgcgtcgagtacttcgtcgacgcttggctcgaacgcatacagaggagtcgcggcatcggcatcggattccggcacaggaccggattccggctgttccggaagcacgagctcaacgggtagcatgcgcagcacacgcaccttctgaaccaccatattcacgaactcggtgaacacaatgtagagttcggagactccaccttggtccgccggcttcatataagcgtccaacagtgccttcgagatggactctgcgacttccacgccgggctggtcggtatcgccttcccaagtgccggcaacatcacggttgcggtacttgtaatacgtcacaccgcgacgaccatacacatacagttccggctgcttgccctgctcatcgagtcgggccaacagcgattccgtttcgcggatgatcgaggaggtgtacggacctgccataccacgatccgaggtaagagcgaggacagccacgcgagggttgtcctcgttctttttcacgatcggatggtcgatatgggtatgggccaccagcgcttgcacggcgtcgaaaatcgcatcggtatacggcttcgcgttcaaggccacgtcacgtgccttggcgatatgcgaagacgcgatcatctcctgcgcgttgaagattttctccagcgacgcggtggaggcgatcctagatttcaatgcgagttgcgagcccatgaatcacttctctcctgcgacgatcttttcctgctcgaccggagtggtgtgcttctcgtcaggcttcttctcgaccagcggcttgcccgcgctggtcacgaaggtctcacggaacgcttccacggccttgtcgagggcagcctcggtgtcggcggtgaagtcttcggtctcgcgaatggtcttgaggatatcggtgttgtgatccagataatccagcatgcccttttcgaacggcaacacgtcgctgattggcaggtcatccatcttgccatgggtgccggcccacacggacacgacttcctgttccatcgaatacggggagaactgcggctgcttcaggagctcggtcaggtgggcaccacggttcagctgagccttcgaagccgcatccagatcggaagcgaacatggcgaaggattccagcgaacggtactgcgccagcgagatcttcagcgtgccggagaccttcttcaaggccttcgtctgggcagcgccaccgactcgggacacggagatgccgacgtccacagcaggacgctggttcgcgttgaacaggtcggactgcaggaagatctggccatcggtgatggaaatcacgttggtcggaatgtaggcggacacatcgttcgccttggtctcgacgatcggcaggccggtcatcgagccgccgccgaggtcatcggaaaccttggcgcaacgttcgagcagacgggagtgcagatagaacacatcgcccgggtaagcctcacgccccggcggacgacgcagcagcagggaaatcgagcggtaagcctcagcctgcttcgacagatcgtcgaagacgatgagcacgtgcttgccgttgtacatccagtgctgtccgatggcggaaccggtgtacggtgcgatgtacttgaagcctgcggaatcggaagccggggaagccacaatggtcgtgtactccatggcgccggcctcttccagggactgcttcaccgatgcgatggtggagcccttctgaccgacggccacgtagatgcagcggacctgcttcttcgggtctccggattcccagttgcgcttctggttgatgatcgtatcgattgcgatagcggtcttaccggtctggcggtcgccgatgatgagctggcgctggccacgtccgatcggcgtcattgcgtcgatggccttcaggccggtggacagcggctcgtcaaccggatgacgatgcataacgtcaggtgcttgggcctcgagaatacgacggccttcggtcttgatctcgccaagaccgtcaatcgggttgcctagcgggtccacgacgcggccaaggtagccgtcgccgacgggcacggagagcacttcgccggtacgacgcacttcctggccttcctcgataccggtgaaatcgccgaggataaccacgccgatttcgcgggcgtcaaggttgaacgccaggccaagcgtgccgtcttcgaaggtcagcagctcattggccatgcaaccaggcagtcccgtcacgtgcgcaatgccgtcgccagcggtcgcgacataaccgacttcctgggtcggagtgtccgacggcttgtacgactcgacgaactcatcgagcgccttgcgtatcgtggtgggatcaatggtaagttctgccatgatcactccttattgttgtttttaaattcagtcaagtcttgtttcaggcttgttcaccgtgtggcgtgccgtcaggcggtcgccttcaccgtgcgctgaagatgttgcagctgtgcgaccaccgtgttgtcggtgacctcgtcgcccacctggatgcgcataccacccaagacggtcgaatcgaccaccgagttgatgtgcaccggatggccggtcttcgccgaatagatggcgacgagcttcttgacctgctccttgctcagtggcgttgccgtggtgacggtgaccatcgattcgcccatatgacgggagaacttgttgatcagccactgaatggtctgcagatagcggcgattgcgcagattgcaggtcgcatgctcggccagacgcttggtcaccacattgaagtcggcattgccgatcaggctgtacagcagcttgatacgggcttcggcggggacggttgcgtcatacagcttgctgcgtacgaccggaaggttgagcagtgcggaatgcagctgggcaagctcgatggagacctgcagagtagcattcgtgtggtccgcgtagtacatcatgccatccacaccgaaatcctcggtggcgttggcgatgtcggatacgcggctccagcggcgggccaccagatcggacatgatttccatcgtcaacggatgggcatcatctccaatgagggtcttgactaccgcaaccttgtcttcgactgggcgcgacgggtcggtgagggcacgttcaagctggatgttgtggtcgagcgcgttggtgatcgtgaacagttcgttcccgatgcgccatgcgtcctcgccgctgtcacgcagcctgggggccagcgagtcacgcgaaacgcggtctgcgatacgcgacgcttctcctcgcattggtcacctccctttcttgaaggtttcgatcacttcttgtcgctgtccagatcggcgatcatctggtcgatcatcgtcgactgcacgtcgtcgctttccagcttgctgcccaggatcttgccggccagtgccgttgccagcacgccgacctcacccttcaggctcaccagagcctgctgctgctgggattcgatggaacgctgggcggtggcggtgatctgcgccgcatcagcctcggcacgggtacgtgcgtcggcgatgatgtgcgatgcttccgcgcgagcgtcgtcgcggatcttggaagcctcgacgcgtgcgttgctcagctgggcatcgtacttcgccttggcttcgtcggcatccttctgggcctgttcggccttggcgatgccgccttcgatcttggctgcgcgctcatcgaacacggcctggaacttcggcaggaagaacttgtagaagaacacggcgacgatgatcagaatgaccaacgaccagaaaatgtcgtagcttttcggaaggaacagttccatctcgctagctgcggtcaccatagtgtcttcctcctttcacgttcgtttgcgtcttcggtgtttaccttggggatcaagtcttacttgatgaaggcgagcacgaagccgagcagtgccagcacctcgacgaatgccaggcccaggaacatgagggtctgcagacggctgccgagctcaggctggcgagcggtgccttcgatggtcttgccgatcaggatgcccagaccgatgccagggccgatggcggcgaggccgtagccaacgacgttcaggttgccggcaacctcagcgagggtaacgatatccatgattgtttcctttctggttattgcttgacaagaagcaacacttaaaaagccggcggtcagtcgatctccggatagctcatattgatgtacgcggtggtcaggatggcgaagatgtaagcctgcaggcaggcgaccagcgcctcgaacaggaacatgaacatgccagccgcgaaggtgatgatgccgaacggcatcatcagcttgttcaccacatcaacgaggaagaactgcgtggccgagaggcacaacgcaaggatcaggtggcccgaaaccatgttggcgaacagtcggatcgtcaacgagaacgggcggataatcagcagctcaagcagctgaatcggggacagcagaatatagatcggggccggaacgcccttcgggaagatctcgtccctcaggaagtggccaaggcccttttcacggatgccggcaatccagtactggcagaagcaccacatggcgaacaccagaggcagcgtgatggacgcgcttgccgcgatgttgaagcccgggatgatgccgcacagattgaagaccagcaacgtgcagaacacggtggtgatcatcggcacataacgcttgccacgcagctcgcccatcacctgatagacgatgttgtcgcggacaaactcgatcagccattcgactgcgccctgccaacggccagggatgagctttgcacggcttgccgtaattccgagaaccagcagcatgatgacggtcgcaagaatacgaacgaggatgatgcggttgatggcgaacggcgtgccttgaaaaacaaacggatcgggaaggaagtcattgatgctcggcatctctggaccatcggcgatggtcatgatgccctctcccaatgcactaatcattcacgcctcctgctcttgtgtcagctgttagtctagcccaacagctgagtcgaatgtgacattccggttaccaaaccagaacatccttcgggttctatgttaacgcgcccataaacgcgttcgcataccagccccgaatggctgcaaaggattatcagcccgtggctagacaacattccgcaccgggagctttcccctactaccgtatagcgaaaaccggcgtttcgcacgttgcggggactattagacacaaccacggccgttgtcgattcggcctatttcacccccattcacaccaaaatagacatcgtttgcaacactgcttgataaaacgttttacttaacatatcgcaccataatatatgacggcgaaaatgaaacgatgtcgcagcaggcaacaaaaaccgcgcaaaaagcccacgacaccgcgcaaaagcggcaatcgtgggacaatcgccaatacttgtcagtactcgccgatcttcgtgaaatcagccgcgaatgacaccgtatccatcgtgcgagaatggcgtgaacgcgtcgacacgcggcgaaccgggctcgtgccggatcgaacggtcggtgccgaggcgcttctcctcgcgcagctgcggtacttcgctcaaatcgtatggcgtggtctgatagacccagttgagccagttgcgccacagcaggttggcgtgggcgcgccaggcgaacagcggttcgagcttcggatcgtcgtgcgggaaatagttttcggggaacggcacgttggtcatgcccttcttcatatccctctcgtattcctcggcgagcgtgtacttgccgtattcccaatggccgagcgcgaacacttcggagaagtcacgcgtggcgatgagccccgggccggacttcggaccccacgtgagcacctgcagctcgggattatgggcgatatcaccctcgttgacccccgccaggcgggaatgcggttgcaggcagatctcgtcgaaaccgttggtgaggaagcagtattcgtcctgcagatactgggggaacactccgaagagcttctccggcagcaactccttgcgcacgccgtaccgatagttgagcgcgcccatcgcgccccagcacaggtacatggtggagaagacgtgggtggatgcccagtcgagaatctgcttgaactcgtcccagtagtcgacctgctcgaaatcgaggtgctcgacgggcgctcccgtcaccacaagaccgtcgtaatagttgtctttgaacgcatcgagcgtctcgtagaacttcaccagatggtcggcgctcacgtgcgtggcctcgtgggtggaggtcttcatgaagtcgacctcgacctgcagcggactcttggagatcagacgcagcagttgcgtttcggtctcgatcttcttcggcatgaggttcaggatcaccagcttgagcggacgcacacgctggcgctccgcttcgggcttttcaagcgcgaagatgcgctcggagtcgagaatgtctctggccggaaggccgctgggaatcttgataggcatgtttcctattatggtgcggacccggatatggcgtattcggcggttttcatcgacggtccgcagcgttatacgaaaaacggataacgcgttatcggatatgcgatttcactagcagcgcaatatgcgacacgccgatttgacttattagccaacatccgtaaagtagttagagctgcctcaatgaaggcaagccgacgcggggtggagcagctcggtagctcgctgggctcataacccagaggtcacaggttcaaatcctgtccccgctactgcgggcggaggccgtcacgattattcgtggcggcttttcgtttatccgccgtcgtgccctacggggccgcatatccgatcggggcgatgatgtcctgtgaaaaaacaacatccaagcccgctctgggcagaatcaatcaacctatggctcgactccctcaaggcggcgggctactcccccaacacgatcagcacccgccgatgccagatgtccgcattgtcgagggcgcttgagggcgatcctagggacgtggaaggcgacgacctgctcgcccacttcgccgcgaaggactggaaaccggagacacgcaagggcgcgaagaacgcctgcgtcagctatttccgatggctcaaagcgtccggccgcagcgaggccgatccgagcgagttcctgcccaccgtcaagcgtcccgagccgcatccccgcccatgcccggacgtggtgatactcgccgcgctgcgcaaggccacggacggcgaacggctcatgctgcgcctcggcgccgaatgcggtttgaggcgcttcgagatcgcgaaggtgcacagccgcgatgtgatgcgcgacctcgtgggctggagcctcgtggtcgtgggcaagggcgacaagcagcgcatcgtgcccatcggcgacgacctcgccctgctgatccgatccgccaacggctatctgttccccggccgatggagcggccacgtcgaatcatcctacgtcggccgacacctgagcgacctcttgggcgacggatggacggcgcacagcctgcgccacaggtacgcgacaacgacctacgccgccacacgagacctgctgctcgtctccaagctcctaggccacgcctcggtcgagaccacgcagcggtacatcgccatgcccgacgaccgcctgcgcgccgcagtggaagccacgcgcctcgccgcatgatgttgtattgatgtcatattgatgtatagtagacgtatcaggaggtttgatggagtttgaatacgatccggcgaagagcgcgaagaacctcgccaagcatggcatcgacttcgaggcggcccagcgcatgtgggacaactcgaagacggtgacgctgaccgctcccaatcccggcaacgacgacgtgcgctacatcgtgctcggcatgatcgacggcaagcattggacggcgatcaccaccaagcgcggcaaacgcatccgcatcatatccgtgcgcagatcacgcaagaacgaggaggcatactatgacagccaagactaagcccgacgccaaggagatcaccagcgaccagcttgaggagatgttcgacaacggcgacgacatcctcgactacgtggacatgagcaatcccgtggtcgaacatcaccccccgctggagaagcgcatcacgctcacgatgcccgcatggatggtcggcgaactggacgaggaggccgccgatctggcgatcagccgcaacgccgtcgtcaacacatggatcgccgaccgcctgcgcaccacgcgacgccgcgaaacgatccacgcctagcccttaaacgacgaaaagcccccgagccataccgtgagtgcggtaggttcgggggctttgttatgtcaggccttggatgcgcgggccttgagggtgcttgcgccgatgacgacgccgatggtcagggcgacggcgttgatggtcgtcgcggccggatcggcccacgtccagccccatacggggccgagggtctgcacgagcacgccgatgcccggcagcacgatcagcgcgacccatttgagcacgtcataggctcggttcggcagcagccaatcgggcacggtcggctccgtgccggcggtctgggggtcggtgttttcgtcggtcatattgtcctcgattctgtgatttggaacctaggaaccccgcccggccaaggtgcaggattcccaggttgggttcgggttctcagtagttcagtagtgcagcacttcgccggggtagatcacgttggggttgccgctgcgatagccggtgagctgcgtgtagccgatgccgaggcgggcggcgatgccgctgagggtgtcgccgctgcgcacggtcacggtgcgggtggccggtggggcgttgctgccggtggcgacgctgccgccgccgttgtaggtgacgacctgaccgggatagatcaggttgaggttgccgcttggcacgctccacctggacagcggccacaggcctgtgcgcgaggcgatgccgctcatggtgtcgccggagcggacggtcacgcgggtcgtgttggcctgcgtggtctgctgcgtcgctacggtcgcggagccgaggcgctggttgactatcgccattaccttgtcgtagttcgcgccgagcgcgtcgcggcgctgctggccgttgccgtagtcgccacggatcgtggcggtcgcgagtgcctgtaggtcgatggtctgggtcggcggcttctcggtcggcggcggggttacgggcttggctgcgccggcggggttggcgtaggcctgccactgggatgcgtcgcctcggaagtagttgaggtcgagcggcccgttgtagccgctgatccatccgttggaggtgtactggcgcatggcctcgccgtagatcgcgtagttccacggtcggctctggtagccggtgggagcgttgctggcgtactgcgcgacccagagtccgcagttggctctcacgtcgctggggagctggttcaggtatccggcgccggtgtacaccatcggccatacgccggtaagcgtgtggacgcgctggacgaaccggcgaacccagtcggaattgccccactgggcgttctgataggactcccagtcgagcacgagcacggccctgccgatgtagtccctcgcccggccgacgaagtagtcggcctcggcctcggcgttgttgccgccggcgtagtggtacaggccgaggctcttgccccggtctgtcacgcacttggcctgcgtgcgccaactggagttctcgaagcctacgccctgggacaccttgacgacggcgaagtcgtagctggcggtgcaggtcacgttagcgtcctgccagccggacacgtcgatgccgaccatgtcggccatcgcgatcgccggcgtgcacgcgagcagcacggcgaacagtgccgcgatgagggcctgtagcggcttgcttttgttcttgattttgcccattcgttttccttcctgtgttgggtgggcatatgaaacagcccccgccgggatgtccggcgagggctaaaccttcttgggggctatcggcgcgtcctgtatgtcctggttgacttgggtgccgtgcccgttgccgccgaggctgtggtagctgtcgtagacgagctgcgcggtccgtttggcggtgttgtcggcgatgccgtcgttggcgaccatttcgcgctgcatctgttcgagcttgcacagcaggagcacgcgcacgccggtctgcatggcgtcggatttgcgtcggtagccgcgccaccagccgagcatgtatccgcccagggcggtgatgatgccggtggcggcccagacggtgagctgctgggctatggggttcactctccgatcccctcgtcgaggccggcgatgtatgcccgtacggcttcgcggcccgcttcgggcacgtcgtcgatggtcttgcggccggcgatgacgagacgggcgtagacgcggatcatggctttgctcatgcttcaccccctgacagcagctggtagatttcggccaatgcctcgtcctgatcgaggctggacgcctccaagccggcgaggcgctgactgtccgatttggatgcctgcacgcagtcgagccagatgctgtcggcctgttcgatggcttcctgttcggtcaggtcgcggatcgtgtaggcttcgtcggcggtgtattccgtccatgcggtttcgccgtccccgtgcatgacggtggtgatgttgcggcggatgcggatgtccgcgaggccgtcgccgcgcgggtagtagctgacctcttcgaggggttcgaggctggatacggtctggagcatgggttttccttcctgtgttgggtggataaataccgggttgcgcggcgcatggtgtggtcgatgcggtggcgtcgccgatatcggatgctgtcgctgttgcgcaggtatccgtagtaggagcagcagcgtcgcgcgagctgttcggtcatgggccggcgtctggcgcggttgaaggtgcggcgggcgcggaggaacacgccgctgcggatgttgacgcggccgtggggtcggaacgtgtagccgaccatgtcgatgggttcgaggtcgaggcgtttgcagttccattcctcgtgcacgtcgagtttgagcgcgtccttcaggtagcggacgatgcggcgggcggcgatcttcaaatctcgtttggaggtgccgatgagcagcaggtcgtccatgtaccacagttggtgcgtgatgagccggcggcgggtgatctcgccggtgcgccggctggtgcgttcgatggtcatggccggcgattcgatccagtggtaggcgtggctgaggtagtagttggcgagccattggctcaggtagctgccgatgttgaggccgttgtcgccttggtaccggtcgatgaggtggaacacgaggcgcagcaggatcgggtcgccgacgtcgcgcgtgagcatcgccttcaatgtggggcggtcgatgctgggatagtatttgcgcacgtcgagcttcacgaaccatttgctggatcgttcgcgtgtccatcgtttgatcgcgcggcgggcgtcgatggtgccgcgattggggatgctggcggtctgccatcggcccaccttcgcgtcgaacaacggctggagagccatgacggccacatggtcgtagatttggtggcgtaccgattcgcggccgatgacgcggtgtttgccgctgatcggttcgacgcggttgaagtacgtgatcctggtgtcgcggtatcggccttcgcgtatctcgtcggcgatccgttcggcgagccggtcgaggtcggggtgggtttcgaggaagcgggtcacgtcgcggcgggaccgtttgcccttgaggtagtgatcgatcgccctgcggacgaacatgggcgtggcgcagcgggtgtgcttgcaatgggttttcagagcgtttcctatctggactatgccggcgttcgacggtgctggatgggttcgggcctaccggccgggtgctcggtttgattttcggctgggccgtggcttgccctctcactggctggcgtggagggtagttgtggcgtaatgatcgtgttgacaggattgaccggatatgcggcccccgatgttccacctgcggttcgcgaggtcgttcctgaggttcgcggcgaaagcgccgtactgcaccccatccctgaggttgccgaagcgctgcaccacgcacggacgtcggaggcgtaccgccacaaatcccaaagagttgcgaaacgtagaaagggggctttcgccccctcgcttcgcttcaccccccatcgcactgcggctacgccttcgtgcgaccgagcgcagacaggcggcccccgatgttccaccagcggtacgcgaggccgttccagagggacgcggcgaaagcgccgcactgcaccccatcccagaggttgccgaagcgccgcacctgtcggaggccttgggatgtgagcgggttggctccgatggcgtcgcacatgccggtggtgctcgtcgcgcccagtcccgtggggatgattacgccattggacagggtgaagtcctcggcgtagcgccatgagtcgttcgtggtcttgtcgcgtgcggcgaattcgccgatcttggtgtagttcgccgtcgaggtcttggatgccttggtgatgtcgaacacgcggtagagttcgatgcggccgaggttgtcgttgtccttgacggcgttggcgatgaggtcggcgtcgctttcgtagatgccgttgaacagttcgatgccctgtaggcggatgggctggtggtttgcggcgaacgcggcggatgggcggccgtcggtgccgagcagcttgtcggtggccccggtcttccacggcatgctgctgacgaagcatgcggtggtcgtggtgatgggggttccgtcgaggttgagggcggtgttgctgtcgtcgatggcggtcttgctcaggatggtgcgtgcccgggcggcgctgtagttgccggcgttgttgcgttccttgtcggtgccgacattgacggtgctgccgacgtcgaagttgttggcgtagctggtggcgatgatgacgcgcttgacgccggtttcggccttggtgacggcggtctgaggcgtgtactgccagcagccgccgagcacgtccgagtttttggtggcgtatttgagcatgagcatgagctggacatagaaggtgtcgccggcgcagcggccggcgtagcccttgcctttcttgagcgcgtagtcgatggctcggttctgggagccgaattctcggtcgatctccttgccgctgacggacagggggcgttgctgggagtcgagggaggcggcgtatttcgcgaacaacaggcatggccgtttgctgccgtcgggcagcagcacgccgggcaatggcgcgtaaccgtcgtactgggtgtcgctgtacaggaattcgttgtgggtgctcgtgctttcgagcttgtagtatccggggcatgtcatgacgtacacgtcgccgttgctgccgtcgcgtttgaagcgggtgtcgatgccgtcgatggcggtgacatggggcacgccgtcgtcgtccacggtggcgttgacgtcccatgtgcggaaggcgttcaggggcgcgtagtcgtcgcgtccggccttggcgttggtgctgatctcgatggtcaggttggcgttgtctcgggtcttcacgccggttggcgtgttgctgtacgtgtatttggggaatttcacgccgtacaccttgccgtccttgtgggcggccatgtaggcggcgatgttgccgtattcgcccttggcgttgtcgtattcgaacttcgcgccgcctgtggcgttggcgtggactttggcgatgagcttggcggtgtcctccaaggtcatgaccttctgcgtgttcgccatgatgttccttcctactggttgatgatggagagcgcccaatcgatgtcgtcttgggtgaggggatggatcgcgtcgccgcccagggcgggttcgatcacggtctcgtactgttcgtcgatttcggcctgtgtggcgaagaccacgcccgcgctggcgctggcggcgatcttttccttgcagtcgtcggagagctgcgcgtattcgatggtcgaggtgcgggctgcttcggcggcgtcgcgtgcgtcgccggcggcgctggttgccttggatgcggcgtcgttggccttgccggccgccgtggccgctgcggtcgcggccgtgtctgccgccgtggccttgtcgttggcgttggatgcggccgtggtggccgagctagccgcgccgttcgccttggatgccgcagtgctcgcggccgtggccgccgcgctggcgttcgtggtggcggtgttggccttgcctgtggcggtgttcgcggccgcggccgccgtgttcgccgccgtcgcggccgtgttggccttgcctgctgcggtgttggcgctgctggttgccttgtcggcgtcgaggatgagctgttcgatccggccgagcttgtcgtccgcgtcgggtgacgtggcgtcgaacacggcgcgttccacgagcccgtagaagttgcgcgagcacaccttgtggccgccgctgctgatctcgatgcccaacaggatgcgtccgggcttggcgagcgccttgcggggcaccgctgcgcggaacgtggccgtggccgcgccgctgaccgggctcatggtcacgcggtcgccgaggctgctgccgggactggtgttgtagtcgagcgcgcaggtgatttcggcggttgtggtgatgggtgtgccgttgtcggtgagttcgacggtgatggtgcggccgttgatgtcgccggcgttgaggcgtatgtctgcgatgtagccgttggctaggtcgagttggatgggttcgcctgtggcttcgcggaagctgtcaagcgttgccattgccgtcgtccttgttttcgagctggctgcggagttcggctatctgcgcgtccttgatgtcgcacatggcggcgagtgtggcgatctgccggttcgcgtcggcgagttgttcggaaagcttctgcgatacgagtcggtcgaagctgacgtactgctggtcatcgttcatttttctactacctttcatctggttattggttgcggcatgaggcttgcgtagaagctttcctcgtcgttgtcgatggcattggcaaccgtcttgtccgagagcaggtcggaaagcgcctgtgcgtcaacgcaggacgtgtctatgccggttccggcgtctgagtcttcgagggcgtatgtcgataccgattgcgcctgttgcgggatggttggtaggtgcatgccttttctggtgtcgttgcgggctacagtcagcggatcgttctggacggttccgtcatcggcgagcattgacatgtccgccgcactgtcgttcagcgccgcttcgagcgcttcataggcctccgtccagacccccctgccggttgacggatcgtatcgcgtcgtgtcctcgacgccttgcattatcgcggcgactgcttcggctgtggatccaagtccgagcagtgccgtccaggatgcaatggttcctggggagaagacgaattgctggtatccgttgatgggttcgtcgcagttgacgatgatgttcccgtcgctcattgtcatggtttgtctcatgtttggctttccttatttgacgagccatccgaaggtgtcgcaatacatgtcgaccgtacatgggttccggtcggcgttgtacattaggatgtcccatccggattgtcctccggtgtttttgacgtgcatgatgatgccgccccattctccgtcagcgtttgcgacggcgtagtatctgccgtattttgccggcgatgacacggtgaagtgcacggtcgcggccgcaccgaccgatattgccccgccgttcggcatccatgccttccatgccctgggtccatcgagtgtgtgacggttcgtatagcccccgaggaagccccctaggtagaggtatccggtgttgatgtccgccttcaccccgacggcgccgtttggatcccatgccgcaagttccgaatacgtgtccatcgcgtttgtgtctggagaggccgaagacaccagtcgtgcgccggagctgttcgcgtcatttgacgacaggctgtagtcgcgcatgacgagtgcctggaagacacctcgcatcttggcgttgtcggttttcgtgctgccgactcgtacgaaggcgcctggatctgtgttcgcgcgacgaccgccgttgaaggtgagcgtcgagatctcgcccatctcggaattcgtggactcggcagcgatgtatggctgctgcgccgccgtggttgcgtggatgaacgagatgccggcgccggtgatgtcggcggatcctccgatcggcttctgtttgaatttcgggctcatccacaggcgagatccggacgtgccagtctggaaggtgccggtgagcgtgttatggactccgtcgccgtcgagatgaaccgtttcgaatccgttcgcgtcgctcatgctgaagattccggagtcgaggttccagtagcttctcgcgccgctgatgatgccgcttcgcaggtaggtggcgttgacgtacagcagtcctccgctcatgtacaggccctgcagctggccgttgttcgtgagcttgttgaagatgtactgttgcgtgagcgccttctcgaacgtgttcacatggctcgtggccgtgttgtcggcatacgatttggcggcttcgagcgtgctggtgtcgccggccgctgccgccttcttcgccgcctcgagggccgcgttcgccttgttcgtcgcatcggcctcggcgtacttcttcgcttcggcgagcttggccgtgtcggccgcgtcggcctgacgcttggcctcggtgatcgccgcctgcttggccgcgtcggtgtacgagttcgcgtcggagagcgcgccgtcggcgtattcctgcacggtcttgccgcccacggcgctgcgggcggacaggctgaattcgccggtgtccatatcccaaaaattgaggcctgctgcgtcggagagtcggccggtgaagatggtgtcggcgaagaggcccttgccgttggcgaggctgcggaagtcccagtctccgtttgctttcttgtggtcggcgatgcgccagtagccgccgccgatgtggatgcattgggtggggttctggtcttcgggcttgtcgtacacgtagatgccttggccgggtttgaggtacgtgtatccgccggtggcgttcatgatctggttgatgcggtcgatgaggtccttcatgtacgggccggtgccgccggcggcgctgttccatgcgccggagttggagacgagtttgtcgagggcctgctgttgggcggcgaggcgctgcgtgtaggattgccggatgttgccgagggtgatcttggtttcggcgaggctgccggctaggtcttcctcgatctggaggatgcggccttcgaggcggaggggattggtgaagctggtgtcgatgatctgcacgctgtcgccgacgtccgtgccttccgggtcgtatccggcttggccgagtgcggtcacgtcggccgtgtagctgacggtcggcgtggtgcgggtcttgagcgccgctttggtgaggtttaggagttccttggggtcttcgcagtcggggaagtccacgcttgcttcgctgtggtgtctggtgccgtcggggccgggtatgccccagttggcgagcgcttggtcgtcttggacgtagggtttgccgttgttgacgtcggcgaagctgattttgcggctgtatccgccggtggcctcgccttggtcgttggtttgttcgatgcctttgccccacccgtagaggcgggtgatgacgtcgccgctgtcgatgtcgcgtttgatttgggtgaggtctttgccgtattcgaagcgtttcgtggtgttggcggtgccccggtgttcgacgaggtggatgatgcgccggccgatccggttgccggtcgggtcgggctggtattcggtctggacttcgagcccgtaggtgtcggcggtcttctggatggcttcgaggacggtgcagtggtagaagctgaggtcggccgtgccggtgatggtgccggtctcgacggtgccgaccgcccaccgggtgccttcgagggctttggcgaggcaggctttggcgttcgcgttgcggttgcgtttgtcctcgatataggtgcgcgagagttccgcgatgctgccggtgcagtaggcgacggtgacgggcatgcctgcggcgcgggcggtctgggtggactggcacaggtattccgcccagcggcccatcgagtccttgaagacgatgcgttcgtccttgttgatctcgccgatggtggtgatgtcgagggtgtcggtgccgtcggtggctctggtgcggatggctttgatggcgtagggcaggtcgccgagcgggttgccccagcggtcgaagatcatgtatcgcatgagtgtgctcctagatgagtgtgagtggcctgtacgcgagactggcggcggtggctccggtgagggtgagcatgttcaggccgggcaatagggggaagtagtcggattcgagggttggggccatgaggttgccgttgacgcgcagctcccggtggtcggggtcggtgtcgatggagatgcgtccagtgatggcggtggtggacgtgacggcgagtttgtggccgtgcgcgtccttgatgctgacggtcttggcgtcggcggcgggggtgagcgtccatgtgggccagcatggccggttgcctttgacgtggatcgtgttcgcgtccgttttgagcgcgatggatcggctgcggccgatcaggtaggggtggacgtcgatgctcacggtgacgagcgtggcgatctgtcgggggccggcccatttgtcctcccatgcgccgaggctcatgcgaccctcgtattcgccgggcaggctgcgccatgagagcgtgacgatggtgccggcgagggcggcgagccgggttttggcggcgaggatgtcgtcttcgccgccgatggcgtacaggctgagcgtgatggcgcggttgcccatgtacgcggccccggtggggtcttcgagggtgaggtcgagttgtccgtcgcggccgggcatgtcctgcgtgctggttgtgggcttggtggcgtcgatggtgatgccgtcggcggcgagggagaacatcatgcgttccagcgggacgccgttgagcgtggggtcttcgacatgcggcaggcgcatgcgtcgctggtagagcatgatgctttcctctctggttttaacggcctctcatggcgaggtagttgagttcgtagctcatgggtttggcgagcttgccggccatgacctcgccgcctcggtcggacaggttgagcgtgatgccgctgctgagcgcctgatcgatggcgtcgatgatgtcctgtttggtcgcgtattcgccttggctgctgtcgatcgtgtaggccatccggccgcccgtgatgcgggtctggtaggcgtatggggtttcgagcatgctggtgtcggtcttcaggctcacggtggggatcatgtcggtcagaccgtcgatgctgtcctcgacgaggccgctggccttgtcgatgccctgggccatgccggcgggtatccatttgccgacctcgtcgcggaagatgcgtgacgggctgtggatgccgagcacgctcttggcccagccgacgaggctgctgccgaggttgctgatcgtgttcctgacccactggaacgcgccgccgatgccgttgatgaggccttggatgacctgacggcccgtgtcgtacagccatcggcccgccccgctgaccgcgccgagcacggtgtcgcggatgcggccgacggtgttcgacacggattggatgccgttggacacggccgacgtgatcccgtgccagatgttcgacaggtacgagccgacgcggttccatacgctcgtccacacgccgctgatggcgttcaggacggtcgagatggtgttgctcacattctggatgcatgtggacaccacgccgctgatcgcgttccagatggtggacgcgacggacctgaccgcgttccagatgctcgtccatacgccgctgatggcgttgaggacggtgccgatcgtggtcctgatgccgttgatgatcggcatgaagaacgcgacgatcttgttccacacgtcggtgaagaacgtgctgatggcggtccatacggtggtccagacggccttgattccgtcgaggatgttcgacaggaacgctttgatgccgtcccatgtggtcgtgaagaacgatttgatcgcgtcccatgcgccctgccagtctcccttgaggaggctgaggaacacgacgatgaccgtgcggatcgcgttcaccgcggtcgagatgtagccgcttatcagcgtgaagatcgtgttgacgacgttgtagatcgccgtccagatggtgctccacacggtgttcgtgctgttcatctgctgggtgatgaacgagagtatccagccgaacacggtgttgatgccgttctggatcgcctgcaagggtgcgacgatgagcgcgccgatgacggtgaacacgttgacgatgaagtctcgtatcccggtgaagatcgtcgtggcggtcgtgctgatgccggtccacacgccggacaggaacgtggtgatcgacgtccatgcgccggtgacgccgccgctgatcgtctgccataggcccgtgaagaagccggcgatgccgtcccatgcggattgcacggtacctgtgatcgtggcccataggttggcgaggaattcgccgagcccgttccataggtcttgcgcggtggcgacgatcgtgttccacgtgtccgtgagccatgaggtgaacgcggcccatgccttgcggccgacctcggtctgggtgaagaaccagacgagcgtggccacgacggccgcgatggcgacggcgatagcgccaatggggtttgccgctatgacggcgttgaacgcgccctgcacggcggtcgccattttggtggcggcgctccacgcggtctgagccgtcttgacgaggcttaggctggagcccatctgtttgagcatttgaatcgggccgcccaagtccatcatgagcatgatgccgttgctgatgcccttggcggcggtcgtcaccgtgttcatggttccggtgagcgcctgtagaccgctgttgagcgcctgatagcccttgactgcggcgaacgcggtgccgatgccgatgatgatgggcgcgagttccttgccgtgctggatgaaccagttgagcgtgtcggcgacgagtttgatgccgtcggcgagaccttcgggagggatcatgtgcgcccagtcgatgaccatgttgacgacgcccatgatcgcgtccctgatggtgtcccacgcggatttgaacgcggtgatcgcgccgttttcctccagtttggagtagaggcgctggaaccagccgatgagcccttcgatgcctgcctggacgacgggcacggcgttggtgacgccgtcggcgatccagctcatgccgccggtgatggcgggtttgacgctgtcgagcacgctcgcgccgagcttgacgaacgcggcttcgaggttgccggtggctccctcgatggtgctggcggatgtggcggcttccacggcggcgtcggtgaagccgagcgacatgatcgcgtcgttgaattcctgcgcggtgatctgcccgtcggccatcgcgtcgcggaagttgccggtgtaggctccggcctccttgagtgcctgttggattttgccgctcgcgccggggatcgcgtccgagagctggttccagttctcggtcgtgagttttccctggccggcggtctgcgtcagcaccatcgccacggacttgaaggtgtcggcggagccgccggcgacggcgttgaggttgcctgcggcttcggcgagcttgtcgtagttgggcacgccgttggcggcgagctgggcggtggtgttgcggatgtcgttgaggtcgtagacggtcttgtcggcgtagtcctgcgtgctggcggtgagtcgtttgatctgctgttcgctgacgccggcgaagttcagggtgctggcgaacttctgggcgctgtcggatgcgctggtgatctcgccggacaggcccatgaacgcttcgatggccttgcccgcgacgctttgcgcgatgccggtgatgacgccgagtttcgcgccgaagccgccggcgaagccgttgccggctttgatgccggcggtgttgccggcggtttccgatgcgctgccgaacgccgattcgatggccttgccgacgcccttcatgctgggcacgatctgtacgaacgcggtggcgatctcgattgccatgctatgcctccctgatggtggtgcgcggtgcggccaggtatgcggctagttgttcgtcgtccatcgccatgacctcgccgcccgtggcttcatgccggacggtgccggggcgttggagttgtccgcgccagcgcgcgcccttgcgtgaggcttccttggttttcgtccaggcgaggaacgcgaggctgtcgcggatgtcggcgaggaggtaggtttggtcgtcccatgcgaggcgcgggttgagtttttgccagatgatggactggcgggggaggttggcggccagtgcggccgcccggttggcgggcagttcgccagtccatatgaggtcggtgttaagcccatagaaacgctggaagtccgcttcgagcgcgtcgggtgccgtggcgagcattcctatgagcgtcaggagtttggggcgacctgttcgaggagctgggcgatgaattcgctgaccttgtcgatgctcacgcgcccggtgtcggggtcgcgcaatgcgtccttcatggccgtgtactgggggccgcagagcttcttgaggaaggggacgatggcgaacgcgccggcaccgttgccggactgggcggtttggaggtcgtagaggtattcgaccatgtcgaggtcgtcgaagatcgcggggctgacggcgagggtgacgcccatggcctcgacggtcttgggctggtttttcgtggttttgtggtcctgcggctgcttggctgccatatgcgtgtcctttcagggtgaggggtgcgcccgccggacggcgggcgcggggtgggatcacttgctgagcgaggcggtggcgacgttggcgatgtattcgacgctggtggacccgttgatgaggtcgctggggttggcgctcatggtcacgccgtagccgatggcgtcgccggcgctgtaggtggtgtcgtcgaattcggtgatggtgccgtcggcgactacgatgcgcttgacgcggttgccggtcatggcgatctcgaacacgaggacgaggctttcgccggacgggatggcgtggtagacggtgagcttgtcggcggtgccggtgacgttcgcggtgccgaaacgcagtttgaggctggcttcgttggtttcgatcatgttgaactgccatgtctcgccgtagccgctgatctcggacagtaccttgatgccgcccatctcgttgatgtcggtggtgtcggtgtcggtggcgttggtgacgccgtcctccgacaggtagccgacgcaggtgtaggctgccggcagtgcggtggtcgcgtcggtgggcagggcggtgccggcgggcgcgtagtagaggcagccggtcttcttgggcttgccgaggctgacgtttttcttgttgttgtggttggtttcggccatgatggtgcctttcggatggtgcggcgtcgtcttattgggtggcggcgtcgagctggatggtgatctggtatcggggctggggcggcgggccggggtcggggaagtcgatgacgctttccacgccgacggcggcgatggggtcgagcaggtcgaggtcgagcagtcggggcagcagcgtgccggtggcgagctgggcggcctgccatcgggtttccgcccatacctgtatggcgaggatggggtggctgctgtattcgttctcgctgccgccgacgcgctcgatggtcacgaaccgcttgggccggtcggcgggcacttcgaggtatgcggtcaggccgtcgccgttggggtcggtgtcgatccagtccttgaccgttttttcgaggttgagactcatcgccgtttcaccgccttgagcagcgtgttgtgcttcgcgttgtcctccatcgccttcacgttgccttcggagccgtgcccggtcgtggcgagcgcgacgctgcctttggtggtgctgacatggggtgcggcctcgtaggtcgcgccttcgacctgtgccatgctgttggcgctggcggcgatgagcgtggcctgttggtcgatggcctgctggatgggtgcggattggcgtaccgcgcggaagccggcgaggttgagttttacctttgccatgtgccggtctcctatcctctggtggcggcgagttcgacggtgaggttccagcgggtcggggtgatgccgcccgtgtaggggcgggggtctccgatcacggtgtatgcgacgccgtcgatgaccgccttggccccgcgcaggctccggtagggccatgcgcggggcatgtggatggttttggcgactcggatgccgtcggggcggatgccgtcggtgaggttcgattggctgccgtcctggatgagcacgtcttcgacggtttcctgttcggtgtcccagatgatgccgccgccgggatcatggccggccggggtgcggtggatgagggtgatggtctcgcctttcatgccgcgcctccggccatgtcgtatgcccatgcctcgccgtcgccgcccaacgcttccttttcggaggtggtgaggtagaggtcgccggcggggttggcgtagctcaggctttcgctgtagctgccggcggtctgggtggattgggtcacgcccgacatgtcggggccggcctgcatggctcgtttgacggccatgcaggcgatgcgtttcaacgtggcgggtttggcgttggcccattgggggcatgtggtgcggatcaggtcgctcgcgtcctgtagcagcgtctcggcgcgggttcgttcgtcgccggtgagcgcgtgccatcgggcttcgaggtcgccgacttgcgcgaacggcttctcgtcgtccgtttcgtcctctcccccgccgtcttgcgtcatggttgtgccgtcggacaggttgagcggggtgctggggtatccgtccatgcggggtctccttaggcgaggatgccggcggccttgagcttggtcagcgtggcgttgaccttcgcgatgatggccgccgagtcggcggatgcggcgagctgcgcttcggccgcctgctggagcacgccgccgcgcgcgctggcggtcggcgcgggcggggtgaaggtcgcgggcttgccggtgatcgagtcccatgagacggtggcgacgccttcggcgaacggggtgccgtcgggctttaccagacgcacagggatggcgaggccggagtcgtcggcctcgtcggttttctgcactacgagcgtctgggtgaggggcgcggccatcacttggccgtcctgccggtggaggtcggcttcttgagcacggcgatgcccttggggtcgaggatcgcgtagctgtacatggcctcggtgcggtaggcgatctggttgacgcccttgaggtccttgccggtgttgtcggggtcgccgtattcgatgatctcgctccagatgtcgcgcaccatgccccacttgatgaggcggaagtcgccgaggaaggcgaggatgccggtcgccggggtgatgaggcggccgttgaccgtgccggacgtggcggcggggatgccgtcgaggctgccgacctggaggttgatcgggatttccgggtagaagcgctggccggtggagggcacgcggatcttgcgcagctcgttcgccatggtcttggacagggcgatgccgttgatgtcgtactcgtcgctgacgacctcggcgaggctgtcgatgtcggcgacgcgatcgtcggtggccggcacgccgaccgcgcttttggcgagcgcgttgaagccttcgagggtcgtcttcttcttggggtcgaaggcgtggtagatgacgtagtcgaggacgcggcccatcgctgcggcctgatctgccagaatcttgctggtgatctccagtttggcgtcttcgtcggcccactggagctcgctgctgacgcgggtcgtggtctgcaccttgaagcgtttgccgacgacaggggtgagggtttcctcgtagctggacttctgtgcgccttcggcgacgacctcggcttcggaattgccggtgaagaccatgtagtccttgtcgaggaagagctggggttcgctcggggagagcgcggcgatggtgctggtgtccttggcgcgcttggtgatgacggtggctacttccttggggagcagcaccttgctggtgtcgagtgccatgatgatggtttcctttcagatgaggggtgaggaggtgttggccggttagaggccgaggttgcgcaggtagttgaccatgctctcgttcgggcctttgccggacggctggcggtccgcgccgtgcacggccggggccttgggtttggggttgagcagctcgtggatgcgcttggcgtgcgattgcatggcttcgaggctgtcgccttcgatcacgtcggcgggtacgccggtctcggccgacacctgcgccttccagtcggcctgctgttccttggccttgtaggcggctacctgcgcttcgagttcctgcgtgcgcttggcggccttctcggtttcgctcatttgggattccttgagcttttccagctcgtcggcggcggccttgttggccttcgctttcttttcccagtcgcgcgagtggccgagcgcttccttgtatttggcttcccagtcgatcggatcgccggcgttctccgtgccggccgatgccggcggttgcccggtgccgccggtggactcgccgccttccggcggggccgcgacgaatcggatgtgatggggtgtgggggtgaggaacatggttgttctccttgtggttgagccctttccgggcattaaaaaagccgcccgtgcgggtggctgaaaatctgttagactggaattgtcttggcttctctacctcgaacccgttattggctctgggagtgagaagccgtttccgtatcgcgttcgaccctgacgatgttcccgtcgtagtcgatgagcagaacgtagtcgagacgtctgcgtcgaagcgatgaccgtatgtagtctttgcaggcttcggcgtccagttccgttctttccttttgcagatgaatgactgcggcgtctccttggcgggctgcggatcggagaagctggtctatggtgtttttgccgtgtccttccggcgctttgaagtccactcgtttaccgttgatgatggcgtctgatgtcttcacgccttgtttgtcgcttctttcgcgcactgtcacggcaaacccgttgtctttgagggcgtcgagcgttttgcgttcgtgcttctgaagttcagaccacgcccttgcgctttccacggagggttccggcgtggtgccgtcgtacagccatcgacggtcgcgctggctcatttcctcggtgatgcgatgcgtcgtccacaggttgtagtcgtctatctcgtcttcgtctttacctgcgtccttcatacgggcgacgtattttccatattcgtcgcgattgagcatgccggcgatcgtcttgcggcattgcaggtatcgggctttcatgccttccgggtcgtagcctttgacgtgggcttctccccaactggatacgatgcggcagtcgtcgttcttgtgatatcgattgtcccgtccgccggccttttcctcgctccagtagacgaagcctcgcgaggccatgaggatgcagaacgcgcaggtcgggccgaccggaacgcgggcgtagcgcggttgcgagggatcgtgctcgccgttgaatttggccgtgagtcgtgccgtgacgcccacgatgtcggcggcgaggttcatccattcgtcttgtccgtatccgtcggtcttcatggcccataggtcgtccatcgtcagcccagcgcgactgcggtggttgatgacgtccacgaatttgagtccgacgtggtcggtgctgttgtatcctccgacgatctgccagaaggcgcgatccgcgctcacctgcgacggttcgtaggacggcagttccacgccggcggcttcggcccatgcggatcgcaccgcgtcatagtagtcgttggcgacttggttggcgcgatccgcgtaggtctcgaacacttccgtgcgaaggtagtgcagcgggtcttcaaaattgtcccacgcaactccggccgcgagctgcttggcctcaagggacaggtcggcgagcgcgtcctgatagtcgtcccagaggtcgtcaagatgggtttggaatgcttggcgctgctgtggagtgaggttgttcagcggcaggttggccggtttgctgctcattggcttcggcctccttgccgtcggtcttggcgattgtcagtttggctctgagctcgtcgatggattgctgggtgcgctgttggcgttcgtaggttcggtgggctttgatttcgtcccatgtcaggccggcgcggctcaggcccacgtcgctgtcggcgaaggcggggttggtggatgcgaccttctggtaccagtcggcgcgggcggcgtcgctggcttccttgaccggtgcccagatgggtcgcagttcgcgcaatgcgtcggggtctgcgccctgataggccagtgcgatgctcatggcttccttcaacgcgcggccgaagcgtttgttttgccggtcggcggtgcgggagagcttgcgttcggcttcggccatcgcctcggccgaggcgggattgtccatcgtgatgccgaggtcgttgacggggatgtcggtttcggagctgaccatgagggcgatggtgcgcagcatgtcggcgtgcggggtcatggatgcctgctggagctgctgcatggtgggcttgtcgccgttcttgttggcgggcatgccgttcatgacgctcacgatgctgctccatgtgtcgtcggtgaacttcttcgacgctccgatgaaccacacgcggggggctgcatagaattcggcggtggcctccatgcgcaccatggttcgcaggccgaagtcggtcaggttcatcagtgtgcgggtgatgcggctgttgcccagcggatggtaggactgggcgtcgttgacgaggggcacgacgcttggccggtcgaggttggtttcgatcgtccgcgccgtccacgggccttcgctgttgtcgatttcgtagaccttgccgggcagccatacggtgaacgcggtgatgcgcccggttctgtcgtccttgtcggtgatggtcaaggccgagccgagacggcggcgccggcggtcccagatgcccgcgctccagtccgccgagcggggcagcatgaggatgcggccgggttcgtcggggtcttcgtacacggtgatgaagctgcatccgtggatgtaggcgctggtgatcgcctcggagatgtcggtgtcccatgcgttgtcgtccacgagctcgtccacctgcgcttgcagcgggtcgggcgcgtcgaagccctcgaacacgttgaggtcggcgagcgctcggactgctttgttgggccatccgatcattggtttggcgagggcgcgcatttctttggggatgctgtaggcgacgccgttgtatcggtatcgggcttggtagtattcggctctcagcatgttgcgtgcgtagtggtcgcgccatgttgtgaggagtttttggatggtgggcatgtcgtcgtcttcgacgcctttgatgcgggtgatgttggcggattggacggcgaggtaggcgtcttgggtggcggggttggtgatggcgacgccgttgtggtcggtggtgggcattagaaccatgtctccgtttcttgggtggggtctcttctggtggtcatggccccgtggagggcgagggtgacggcgttgagtgggctgatgtcggtgtcgtcgtcgggtcggttccatccgaagagtccgtttttgccgatggggcgtgtggtggctttggcggcggcttgccagagtggttgttggccgtcttcgggcaggtgggtgagggtgccgtctctgagcatgtcctggaggcggccgcaggcgcggcccatgtcggtggcggcggtgacggtgacggtgacgccggcctgggcgaggtcgggcaggagcgcggtggcggggctttgcccgtcgatgacgagcgcggcggtttgttcccagaccttgtcgatgaggttgacggcccacatggtgccgtcttggttggtgtccctgtattcggcgagttcgatgtgggcggtgttgtcggcgtagcgcatgcatgcgccgatggtcaggcgcgtgcgttgggggttcatgtcgatgccgaagctcatgacgccgccggggcggcgtttgtcgatggtggcttcctcccattggcggcggtcgatggcctggctgagggcgtgttcgtcccagatgccgagggcttcgcggcggaagtcgtcgccggtgaggttttcccacaggttggcgatggattcgtcgctggtgtgggcggggtagctggggttggctttcctccattgctggcggtcgagggggtcggcgtcgcggtctgcggtgaattcgacgtagagggtcgagtgggtgcggccggcgcgcgctttgtccctcaggcgggtgaacgcttcgccgttgtcccttggcccgggcggggtgcccatgtagatggtctgggggttccaggcgcggttctgggtcggcagcatcgacgccatcgccgagtcggacaggtgctgggcctcgtcgatgacgagcagggcgatcttcttgacgcctcgcaatgcgcctcgttctcgcgcgcggaagaagatgcgcgacccgttgcggaagcgtatttcctccttgccggcggccagggatatgccgtggtcggggtcaacgagaccgctcatttcggggcgcaggacgatcgcgcacaggctttcgaacgtgtccttgatgacgctgaagtgctgggccgtccacacgatgcgcatgccgggggttcgggcggcgcggtggatcgcgacccagccgatgtcgtaggtcttgccggtctggcgcgggatcgacagcacggcgttgcgggcgctccagaagccgtcggcgcttttcgcgaggatgatccggttgatctgccgctgccagacgtcgaaccggtcgcccgccgctgcggcgagcctgttgaggctcggctctccgctggtgtacaaatcgtcggggatgatctggcagctcgccccgtcaatcctcgtgttcatccaatcgttcgtcctccgtgtccagggcctgcatggccggatcgtgcccgttcgacgccttgtcgatcgcctcgatctcggcgctcatgtccgcgagccgtttcgtcaatgacgcgaggtcgcgtgagcttatcgacccttcgtcgagcttttcggcgatcaggttgcgcatcgccaccaggagacggcggcgatccccggaagcggcggcgttgctgaccctatgggacttcgacgcgctcttcgagcgaggggtcttcgacgttctggacaccaagacggcctccgttcaagtgtggaaaaaagcccgggggaaaaacggcgctttgcccgtggtcgccccggcggggccgggtggggtctactccccacccccgaaccagtccgagcatcggatcggcccggccgagaccggcgcgatgcgctgcggggctttgccctgggcgatgagctgggcgacgcgctcgcgcgcccatgccagactgtgcgtgcctttgatggcgttgcaccatcggtgcgcgggcccgctgttgtcgtgcgtgagcgtgccgccgcgcgccagggcgatggtctcgtccacgacgaagctgtatggatgcggtgccttgagctcgtagtcgatgggccgatggcagatgtagcagtcggcccgcatgtgccgccaccgctcgcgctcgcgccggcggcgatagccattgctgtaccgcggattgcccacgcacgcctccaatcgaacgcctgtacggatcgacagactgcgctcgccggcgggaagaagaggaaagaaccgccggcgaggcgtctgtctgtggtggtttctcgggtgccgcatacgccggttgcgcacggtgccggcggcggctggcggatggtgcgggattcgaacccgcgaagcatgaggtcggttgtcatgcctgcccgcctagcaagcgggtgccttcgaccgctcggccaaccatccaaggggatcggatacgaaaaaagcccatccccgatgggacaggcttttccgatactccgattacacgcgacagcgtaacacgaaaccgtctcacgttcaaacgtcgccgccgtcgcgctcggcgcgatcctgcgcgcaggccaacagatccatgatgttccactcccaataatgccggtcgatgcgccgcgtggacggcatcttgccccggctgcgccagttcgccaagtccttgcccgtcacgctcacacccgtgttctcccgcacccatcgggcggcgtcggcctgcgtgcgcgtgatgtgcatgagccccgcgctgcgcaggtactccaaccgcacgcgcttcaagtcgagccatgcgccgcattcggggcacaccgtataccgcgcggagcgggcggcgtagatcggcgtgcgtatcggctcgtcgtcgtcccccttcgtgttcaggcagttggggcatacgccgacaagacggcgctcgccggcgtgcgtggtggcggtttcgaccttttccgataggcggatcaggtcggcgtataggtcgccggccgtgtcgagtcgtgcgaggtcgggcatgtggtgcagcagcaggcgggtgatgtcggcccattgcatgagggtgcggggccggtcgtatcggtcgtggccgatcggtttgacgccgagcatgccgccggtgagttgcaggtgcgtttccactgcggagtacagggcttgggcggcttcgttgaccggcggggccgcgtatgccctgttgccgtggcgtggcgagcgttcgcgggtggtggcttgtttgtaggcgatctgttggagggctggcatgccggccttcaggagccatgcgaggcgtttcgcccagtccttgacgcattccttgcacaggttcgcgtcgccggctggtttgccgcaggccgcgcatgttcgttgttccatcatccccgccctttcgctggtgctatactcgcttgttggacaatgcgagcctctgccgaaaggtgggggcttttactttcccgaagccgttcccgacgtggtggattggccgggaacggcttgttttcaacggtttgctgactttccttaactttctcttctattgtcgccgatgccggcgggtttttccggcgcgggtgccgggtgggcttgcaggatgatggccttcacctcgtcgatggggatgcgcagggatcgcgcggtctcttccggcggcacgcccttgccgtgccattccacgatgatcttcctgacgccttcggtgactctcacgcccgtgcctcctgccggtcgagctgttcgcatgcggagtgcttggcgcacatttgggcgacgcggcgcatgcacttgcggatcgcgccgccgtaggagagggcgacgacggtgaaccggccgaagcattccgggtgcgtcacgtcacggccgggcgtggcggtgcctcgcatgatggtgacggggcctagctgccaggcggtgattttggcgtcgatgttgttcataagatttcctttcttgggtcgtcatttgaccccgtatcggcggccgccccagatgccctgcaactggtagccgttgatccggttgtgctcgtcggcgaaccggcggcactcgccgatgaccgggcatgaccggcatatggcgagcgcggccgcctgttcgtatggtttgccgctgaaccagagttcggggtcgtggtcgcggcatgcggcctgatgtcgccagtccatgggttatcggccgtcctttcggtaggggttggcgcgttccacgatggcgagttcgtcgaagtggttcatggcgtcgaacacggcctgtttgccttgttcgtaggcttcggcgagttcgtcggactgttcggcgtccatgatcgaaccggcctgcggccttttgaagcccgccgtcctgagcctgcgttcgatctcgtagaggccgattggttcgctgtcgcaggtgaagacgatgctcaggcgtttcatgacaagtccttttgcagcgcgcgacggccggcctcggtgatggcatagcgtccgtatccgacgtcttgcgtgtatccgcgttcctccagggattggaaggtgcgtttgtggttgccgtcggcgggctgcatgtcgccgtggttgacgagctggagcagcacactcttctgcgcgtaagtgagtcgtggtctcatttgacgcctccgctcagcgggtcgatgagctcgcagctcatggcgtcgatgcgctcgccggtcttgacggtcatgcacaggcgtttgacgtcgccggtacgccgcacctcctgcgtgacggtctgcacatcccgttcgccgagctgcgcctgttcgccgagcccgtaaccgacggcgagcgccgcgaaggcgatcaccgtagcgggcgcgatcttgatggcgtatggtctgccgttcctcattgttccttctccgttccgttgataaaactccatgcgctcacagcgacctgcttccaccattcgagctcgcggtcggcgatgcgcttgccgctctcatacacggtcggacgctcgccgttgtgttcccagaggttgatggcgagtcgttcgatctcgccggcggtgggttgtgtggcgtttatggattgttcgatgcggatggcgagcgcgagcgcatcgttgtggccttgggtgtatccgatcacgtaggcctcgtgggccttggccggaatgtcgccgagtccggcgtcggcgagcgcgttcaatgcctgttgtgtcaggtcgatgctcatgcgtcttccttggtttggttggtttggctgaattgttcgagatgggcgatccagcgcagcagggcgagggtgacggtgtcccggtacatgtcctgcgtgaggtagcgtcgcgccgagtagatcgtgccgccggtcttgtcggtttcgatggcgccgagtttgatggtggtgccgtccgtctgatcgcacatgatccgaatgcgcgtcatatgcccgcctttctgtgtttgcgttccgccttccatttcacgtggtagaagaggaacgctttgagcgtgcttatcggctcccagaagtcgccgtccggtaggtcgagttgccaccattgaccgcagaccgggcaacgccataccggatcagaaaccctcgggcttgcaatactgactactcactcccccgcctccagttcgctgatgtcggtcggaatgccgtattggtcgcagtggatgcgtgtgctcattgcttgtctctttcccgtttgatgagttcgtcgatgaggacgagggcgaggtcggggtagccttgcttgagttttgcccatgttctggcttcgacgccgacggtgtgggcgacgagtgccgtgagtatgtcgtactgttggcgcgtccacgcgatcttttcgccgtagtcgatgactcggcataggtaccatcgggctttttcgaggtcttccaagggccggcccttgctgtggtagcgccagaggtatttgatggcgttgccgaggcagaagctggtgtcggcggtcagttcgatgcactccatgcccgggtgcgagcgtgtgtagtggtttggtgagttgacggggtcgttggcccatgtggtggcgtgcatgcttaccagtccttttcgagttcccggcagtcggggcagatggatgacgtggtgtcggtgagcggtacgccgcagatcgcgcagatggtcggatcgttggccggttcgggtcggtgggctgcttccaggaggcggcggatgagttcgatggtctgcggggcgggggttgtggtgtgggtgctcattgcttgtccttgagttcgatgtgtccccagtcgcatgacgctccgccggagtcggagaagcatcggacggccgcgctgccgtcgggcagttcgtaccagcggacgtatccggggtcggggttgttcacggtgccctggccgccgcctttgggtgtttctccgcatgcagcgagcgcgaggatggcgaggatcgccgtgagggttgcgggtattcgtttgccggtgttcatgattgggttccttggtgtccggctcgcatgatgtcgaggtaggcggtgtaatcgttgatgtccctgtggatgcagtcttggactcggtgggtgcctgcgtggttctggtaggggtcgcggccgatggcttggtcggtgaggcgcagggtggtgaggtcgagttttctgtggtggagtccttcggcgatggggtggttgaggtggcggctgaggtggacgtcgagttggcgtaggtcgaagtccacgttggttcctgcggggtggagtgtgtattggctgagttggtcgttgaggaattcgtggatgttgagcgcggtgtgcttgtagtcgtagccggtcttgggtgcttcggcgcaggcgagcatgagcccgttggcgaggtgcatttcgtaggctttgagcatttcggggtggttggcccagttgcgcacgttgtcggggtggacgatcaggtgcaggctgccgcctcgggtttcggctttcaggtcggtgacctgcatgccgacttccaggagttcgcactgattggggtcgaggccggtggtttcggtgtcgatccataggagcatgtggggtttggctggcggttttggcgggttgaggggtttgccgctgacggtgatgtcgtgttgggtgttcattcgtcgcctttcttgatgtcgatgtgggcggggaggttttcgggtggcgggcagggatggcgtgtgccgtccttgttgagctgctgccagccgcctgtgcggtagtagacggggatggtggcggggtctttgcccgtgtggacgaggtagccgagccggtaggcgcgtgcggggtgggcgtgtacccatccgtggcatcctgtggtgccgctgccgcagagttggagcaggttttcgggttggtggagccggtcgaaggggtggcttcgcggttccctgtggtggatgctgtcgccgctccagtggatgccggtttcccggtcgcacatggcgcatcggtatcggtctcgcctctgtacggttctgcgggtctcggctgttggcttgctgctcatcggctggcctttcgttggcattcgttgatgatttccttggctttttgttccgggtcgatgccggttttgacgctggcccagaagtcggctctcatcgcgtcggtgaaggtgcctacgggcacgtggtcccggatgtggccggtgatccaccggtcgtcgatgacggtgccgtcgggcagtgcgtgccggtatggtttcggctggctgggcatggtgtccatgtatgcgccttggcgcagccatcggctcatgttgggcgcgtatctggggtcgtccacggttttggcgtaggcgatgacggctccgatgagctgcgcttccgtcacggcggacgtgccgtcgtgcccggccacggctgcggcccacgctttctcggcttcccgtcgcgatccggtgtggcgtgggtaggcgttccacgccgtggcgaacgggtcggccaacgccctggcctcggcctcggcgaccgacgcggtttgcttcgatcccggcccggaggggtcaggggaggaagaaggcatggttttggtttggttaggtacggtagtgcttcctgtttgctttgttgaagttgaagcagtctgcttcgcgtctgcttcgttttgcttcctgtttgcttcggctttcgccctgcgggactcgcccgacgccttgcctccggcgtggccggcgacgaccttcttctcgtgcagttcggcggcttcttcgggcgtaagcggtttcttctggttcttgaagctgccgaacacggcgaggccgcgacgggtcacgaccctgtacacgccttcgccggcctcctcgaagagcccgttttcaacgagttcgcgcacgagtctgacggtgccgcccacgcttctgacgcgcttgaggtcgaaggtgccgtcgaacgagtccggccgcgtgtatatctggtggtcgcaccacgtcaccatcgtcgcgtacagtccgcgcgcggccatgctgctgtcctgcaccgcaggatcgaaaccgaaggtgctgtcgaagttcacagacatggcgcgccgccttcacgacatgcgataatcgacttatgagcaacgacaagaagacccagcgctgcatgtgtgtgacgattgatttcgagcagcttacgttcggtgagctgcgcaagttcgtcgaactgacggcagatcgtgaggacgatgaatttgtgtgcgtcaacgacaatgacggagtgccggacggctttatggcgtatgtggacgcagaaaccatagacgtcgtgccaaccgatgagacgtcggagcgctgatatcgaccacatcttttcctgagccaccccgttgcgggtggcttttttgtttgcctgctgcatataagcctctctcaatgtgtggttacttgatctcgccggtggtcggatcgacggcctctcctctgtcggtctcgtcagcatcgtcgtcgggatcgggatagtcgggcgcgctttcctcgaacgtggcgaggctgtcgtggaggttgtcgtacaggaccgcgcggcgtgcgtccttcggataggtgagcagccggttgatgacctcggcgcagtcgatgatgtgctgcgcgagcgcgtccgtgtcgtacacggcctcggtgtacgggtcgatctggtggaacttgtcgaggtaggcgtctttggtttcgagctgcatcttgtggttgaccgcgcggcggaagtccacggccgcctgcttgatcttcgcgcacgagctgttgaagtccagcaggcttagcgggctcatttcgtcgggtatgagcgcgtcctggacaagtccagagtcatttttctttgccatgagggtgtcctttctagaattccgggtcgccggtgtcggtggtggacgtgtccgttgtgtagccgctgccgccgttggcccacgggtcggacgccggcggctgagacggcgcggcggctggccgtgggccaacgggcgggttgcccgcggggttgccgtaggtgctgccgccctgacagccgtcgtggccgccctgtttcgtgacctgcgcggtcgcgtagcgcaggctggggccgatctcgtccacggtcatttcgaccacggtgcggttggtgccgtcctgcgcctgatacgagcgttgggagagccggccggtggcgatgacgcgcatgcccttggacagcgactgggcgcaatgcccggcgaggtcgcgccaggcggagcagcgcatgaacaatgactggccgtcctcgtactggttggcctgccggttccaggcgcgcggcgtggaggcgatggtgaagccgcacacctgcgtgccggtgccggtggtgcgcagctcggggtctgcggtcaggttgccgacgatcgtgaggatggtttcgccggccactagtcctcgtcctccatgtcctcgatccagtcgccgacgaacgtggcgaggacgtgcgcgtccttggctgcgctgctcgcgatgccccatgccacgtcttcgcgacggttgtggcagtgcagggcgaggtcggagagcgccgcataggccatgtcggccacgtcgcgcatgtgctccagctcgtcaagctcgccggcgtcatccgggccgtcgtcctcttcctcgtcgtcttcgtcgtcgaggacggtgccgagcggcttccggtcgctggaggcgaacatgtcggcgagcgtcttgccattgggcagcacaggttcgaaggatatgtaggccttggctttctcgctcaatgcgaggccggcttggtcgagcgccgtgacgaacagttttgccagctcaccgccggagacggacacgtcgccctcgatgaggccgtagaacttctcggcgagtttttcggccatttcctcgttggatgtcatgatgttcctttcctgatgtcccgtttccatgcccattcgcattccgcgccgatggtcgccgcgcctcggtcgatgacgaacgcggcgggcgacggcatgaggatgaggcgcgggtagtcgagccgtgaattgcattcgcagatcgcgtccagcgcctcggcgatcagttcgccgggcgtcatggtcaggccccgttcggtgatgggccagaccatgagactgcggtgggtgttcatgggactccttcgtttggtgcggggccgcgctggcgtggtcgacgccggcaatggagaccaccggctcgcacgccatcgcttccgcaatccactgacttcctgtcgtatggggatggatcgcggccgacgttgacgcggccccagtggacggcggccgaatcgaacggcttcccggtctttgcccgcgcccacctgacgcgaatctcgaccgggggcgaacctgcccgcccttggcgcgccgccggtggagagaaccggcggcgcgatcattgagagaggtggtgttaacgacttgttccttgtcgccgcccgccgcatcggaaggaaggtcgcaatggcggcgggcaagccttaaatggtcagcacgagcgcgcagagaatgacgagcctgagcgactggtacacaagcgctcccggcttggccttcgtttcgcgcagcgtgccgatgagtatgaagtgttcgagcagcgcgtatccgaggatcacccactgctgccagacgagtgcatcgaagttcattcgccggcctcctcgaacagtgcgacgaacaccacggggcattccacgaacgcccagaacgcggcgaggccattgccgatcggatgcatgcaggcatcgtgagtgaacagccatcccacgcagacgacgaacgatatgacggtcaacaggccgatggtgtacggataacgcttgaacatgaccgccacccctacttggtctggacgagcgtgtccgcgccgtcggggacgacgacgagctggtccgcgttggacaatgcgtcgatgtaatgctgcttgagcacgttgtcggtcagactctcgttgagcacggcgttggcgtcggcctcgccctgcgccttgatcttcttggtctcggcctcggtcttggcgacctgctgctcgttgagcgccttctgcttgtcgatctcggcggcctgcgcctccgtgtacttcttggtgatggcctcgccgtagcgcacgtcctgcacgctgacctgctcgacggtcaggccgatcttcctccacttcgccgccagcgcatcctgcaccgccttcgtgtactcgccgcgattggtgagcatcgtcagggtgtcgaaccggccggactgttcgcgcgccactgaacgcagatcgttgctgatgtagttctgcgtgaacgtctgctgcttgccatactccgagtacaggtattcggccgcgctcggatcaaggctgtagttgacttggacgtcgatgtccgcagaagcaccgctcctgtcgttgacggtgacctgcttgccgaccgcgctgccgccgtcgtacttgtaatcggtgtccttgtagaagttgatgaggttgttacgggtgtcgtatttgatgacgctctgccacggcgtcttccaatggaagcccgcgtcttcggaatggccggccagactgccgcccatgttgcggatgaccgcgacctcgcccacgtccacggaatacaggcatgcgggaatgagcagcagcaatccgacgaggcccggaatgaggccgatgccggcccccttgacgtcgcgggacatcgcgacgcaggtgacggcggagctgaagagcagcaggatgatggagatgacgaaccagatcatgagggttcctttcagaagataaggccctttccccgtgccgcgtaggcttgaagctgcaacacaaacaatccgctgcatgcggggaaaggaagtattcaaatgggtggagctgcaagctgggcgagctcagcggaaacgaagttcaagcaggctcaggcaagcgctagaaatgcctatgagtcacggatgaccgaaggcctagcggacatcgcccaagcgttgttccaaatcgacttacggcttgaccggctcgaaaagaaactggacggtcggggttgagccttgccagtttgcgctcgctgatgacgtcgtggcgtatgtaaaggctttccatgttgagctgtgcgccacgacgctcataggcgttactcatttcgcctccagcagtcggagaacgtcgcgcagctcgcattggacgatcttggtgacgtagacgcatgccttgttgcccaatgcttcaacgatgatgggctgctcaggagtgacctcggcgatatagccggcgtcatgctcgttcaggaacgattgaacggctttgacgtcgccatcgaagctctcgactcgcagaatctcatgccgctcctgatgattcgagcggtctggaatgacgccgtgtcggacggtgtcggccctgagctgcccttcatatacccaacggccggcggcgtcctcgaagcgaacgtcatggcccgacggcgctgcccagcagccgccgacgaggaacagttgcagcacgtcactcaacgcgaacaacagggacatcacgccgtacaggcccatgcggacgtccctttgcacgacggccatcacaaccatcggcaagccacagagaaccagcacgccggcgcagacaatgagggtacggcgcatcattttgtcgctcatttcgccgcctcttccggttgggggttgtccgccggccacgggtcaagagtgcgacccatgaggtaatcaacactcgtattgaaaaagtcagcgagcgccacgtaatcacgcttggtgaagctgcggatgccattgagcttgttggacagtacttgtcgagaaattccgatctcgtcggcgagcgccgactgagtaataccacgtgagctgagcagatcaagcacgatctgcgatgtcttggatttctgtgtttgtaaccgcatgtgattacagatacaccatgagatgacagactcgcaagttatcggcgtgttgactttgtaatcataagtggttatagtgatggcatgaccgaaacaatgacagccccctcggtggcgaccgactatcaagccgtagccatcgggaacatccgaatgatgctcagcctgagagggttgaagcagagtgatcttgctgcctacatgggcaagcatcgtcagaacttgaacaggatgattaacactggtgcacagtggtcgttcaacgacatgtgccgagccgcgcagttcttcggtgtctccgttgacacgctactgcgccctgatctaactcagtcggaacttcgagggaatggaggtttgcctgtcgtcaacgttgacgacttccgcctacgtggcggggcatggaaggccccggctatgattctggccgcctgaccggccaattcgggatcataacccagaggtccaaggttcaaatccatgccccgctaccaattgaaaccggaaaccttttggtttccggttttttgttttccccaggacgtttcgctccttttatataaagtccccatacatatcgaacgcaaccgacgcgcacaacgtatggtcatgccgctgcagccttcataatcgaacataatcgcaaatcatgcattaaaacgctttaccaaaagtatttgaagaaagtacttgtagccgcatcgccgcaatcgttacgaaaagggaaatcacaaaaagaacacaactacctctataatcggctatatgaatgaagcaacatcatcaagcgcgacaccgcgcacaaaggcaacagcaaagacaacagctaaggcagcggccacaaagacaacgaggacagccgcgaaatcaaccgcaaagacgacaaccaaaaaaccaaccaccaagcgcacttccaagccgaaaaccgcaacgaagcgaaccgtcggcgaaactccagcacctatcatcaaccgcaccagcccggaacagttcggccgcgtaaacgttcttgacatcactccgtccgccgaaaacggcctgtacccggctcgcgtggagcttggcgaggcattcaaggtcaccgcgcaggtgttcatcgaaggccgcaccaaggctggtgccaccgtgtccgtacgcaacacgcgcggcaccgagaaggcccgcttccccatgacctgcaccaaccccggcctggaccgctgggaagcgatggtcaagatcggcgaccacagcgacctgaagccgtgggaagatggctatgccgacgtcaagaagcagctcggcgaatggcacatcgtggtcgaaggctgggaagatacgtacgcttcctggctgcacgacgcgcaaatcaaggtcgaggtcggcgacgatgtggagaacgcgctggaatccggcgcgcagctgctggaacgttgggctggcgcacgcgattccaagctgaccgccgacgacaagaagacgctgcgcgaagccgcgaagaccgttgccgacaagtcgctcgacgcgaccgcgcgtcttgccgcagcgaccaccgacgcaatcgcaagcctgcatgaaaccaatccgctgcgcgacggcctgagcgcgtcgaatccgcagcgcttccgcgtggagcgtccgaagtcgagcttcgccgcatggtaccagttcttcccgcgttccgaaggcgcgtatttcgacgccgacggcaagatcgtgcagggcacgctgaagacggcgctgtccggcctcgaccgcgcgaaggccgaaggcttcgacatcgtgtacctgccgccgatcttcccgattggcgtgaccaaccgcaagggccgcaacaacacgctgattgccggaccgcacgatccgggctccccgttcggcatcggctccgagctgggcggccacgacaccgtcgacccgctgctcggcaccatggacgatttcaaggcgttctgcgcgcacgcgcatgagctggggctggaagtggcactcgacttcgcgctgcagtgctcgcctgaccacccgtgggtcaagcagcatccgaactggttccgcaccaagccggacggaacgatcgcattcgccgagaatccgccgaagaagtaccaggacatctacccgatcgatttcaacgccgacatggaaggcatcgaagcggaaaccgaacgcatcatgggcctgtggatcaaggccggcgtgacgatcttccgcgtggacaacccgcataccaagccggtgcgtttctggcaggacgtgatcgccgccgtgacgaagaagcatccggagacgctgttcctggccgaggcgttcacccgtccgggcatgatgcgcgcgctgagctatgccggcttcacgcagtcgcactgctacttcccgtggcgcaacaccaaggaggagcttgaggagtatttggaggagaccaacggcgacggtggtttctaccagcacaacaccttctggccgtccacgccggacatcatgaccgcctacctgcgcgacaacggtatcgccggtcacgcggtgcgcgcggtgctcgccgcgatgggctctccgagctggggcatctacaacggctatgagctcatcgagaacaagcagcgtccgggattcgaagagcagatcgacaacgagaagtacgaagtcaaggtgcgcgattgggacgaggccgacaagtacggcatctccgagctgctcacctcgctcaacaaaatccgttccgagcatccggcatgccgcagctaccacaacctgcacgtcctgccgagcgacgatgcgggcgtggtggcgttcctgcgccagaccccggccgagcttaccggtaccggcaagccggatacggtgatcgtggtggtgaacctcgacggccacaacacgcaccagtccatcgtgcacatcgaactgcccgacttcggtttcgccaccgacaagccgctcaaggtgcgcgacgagctgaccggacgcgagttcgagtggagctgggacaactacgtttcgctggcaccgtgggccgacgtggcgcacgtgctgacggtggtcgaggactgagtgagtttgggtgctaggcactctgcctagcacccagccagcgcaaaacacatagatcaagggcgggttgaagacgtttctcacgttttcaacccggctttgtgcattccgtaggtggtttttttgattccgtaggtgctctccggtcaatccacgcaaacagaatggctgaaatcaagcctttttgccgcagggataccagagccaaccacctacggaagagcaaaaccacctacggaattgttcttccaacgttccaaggcaggatagtcaatcacaatcggccaaaaagatgttgaccagcgagcgcatcacgccttatctccccagcactgagcaccattcatataggtatccggaaaatggtgccgatatggcgcgaaagcgggtattctaagtaacgaactactgctgatcattcgatcaaggagaaaacaatggcagaaaccttcaacgtcgtggtggagatcccgcgcggttccaagaacaagtacgaagtggaccacgagaccggtcgcgtgttcctggaccgtaccctgttcacctccatgggctacccggatgactacggctacatcgacggcactctgggcgaggatggcgatccgctcgacgcactcgtcatgattccgaactccgtgttcccgggctgcgtggtggaatgccgcgccgttggcctgtaccacatggtcgacgaggctggcggagacgacaaggtgctgtgcgttccggctgatgtgcgtttcgacgacatcaaggatgtcgaagatgtttccgagtaccacaaggctgaaatcaagcacttcttcgagcagtacaaggctctggagccgggcaaggaagtcctgccgggcgattactggactggcgccgctaaggccgaggaggaaatcgtcgcagcccgcaagcgcctcgctgatagcgagaagtgatcgcttctcccctttttatgtcaaagcccactgcccccggcagtgggctttttctcttttccagccagtggaggccaggtgccgttgcggggagtccaacggaccaaagcgtccgatttcttcgtaccgcggtatagtggtctcttgtaattttcggcatgcgaacagtattcgctgaattcaaagcccgctggacgtcacatatcacatccgcgtgcggcagttctgtgtcggtactcctaggcgtaggcggaacgcaatccgtcgaggcccatcccgtggggagaccggcgggatgaaccttttcaccagctatgctcattcagattctgcttattggcgtgtccgtgtccatggacgcgttcgctgtctccattggcaaaggcctgaccgtcaagaagcttcgcggcgtcgatgcgttcaaaaccgccctgtggttcggcggattccaggcgcttttccctctgctcggctatttcgcggccagcacgttcagcaaatacgtgaccgccgtggaccattggatcattttcggcctactcgccctaatcggcggcaatatggtacgcgaggcgttcgaagaggacgaggagaacgccaaggaaacccctgaattcgattggaagcacatgctgccgctcgctgtggcctgcagcatcgacgcattcgcggtcggcgtgagcttcgctttcatgacgctcaacatctggctgtcggtggtcatcatcggcatcaccaccggcctgttctccgccgccggcctgtatatcggccgcgcgttcggctcgcggtggcagaagcccgcgcagatcgccggcggcatcgtgctgattcttatcggcgtgaaggtgctgttcgagcatctcggattcctcggttgactgccaatccaacataataaaagcccgtaatcattgcgattacgggctttgtcattagaacagccgtttacagcacgacgatggcgagcgccgccagaccgactgcgagaccggtcagcatgaccggcagcagtgcgaggccgatccacggcgaacgcgcatccggctcggggtcggcgtcgcggtgccagaagtacgagcacacggtgagcgccacggccaccaataccgtcacgatcgcggcgacgacccatgtcatggtcacgttgctgaacatgtccaccgtggctccggaggcagcggacatggcggcggccctagaatgcgttgtcggcaggagcaccggcaggaagcaccagcccgcgctggcgatcatcgcaacgccttcgaccacgctgtgcgacagcgagcggatgaggtgcgtgcggttttcgcgggccatctggcgtccgaaggagatcacgatcagcaggatcagcaggccgccgacgccggcgatccagccgtcctccatggagaagtccttgccgccggtcgcgtcggcggcgaaaatcgcccgtccgagcgtcatcgtcgtggcgcacaccaccgacagcaggccggcgatgacggcgatcacgtgtccggcggtgccgtcgcggaacgggctgaacactaccagcagcgcgatcatcgccagcgatccgatgatggtgaacggcaccacggcgggattggcggaatcgccgtatgcgatgccgggaacgagcgcgagcgccaccaataccacgtacgcgacgatctggatcgccaatactttgccgaaagcgaccttcgacgggttttgctgggaaacggcctgcggagcggtcatctcggacccccttttcatattgtggtcaatacgtatgcaatatgaataaatgtagccgtatgtgtccacatacttcagttacaatcgatgaaacgccgataatacattttgcgtgtacaatcgcggcatcagtttagaacaaaagggagctgacgtgacggatcttacgcttatgacgttcgctagcgatccagctaccgttctcccctcgttggtgctactttcccaccgcgtgcgcgtgttgccgatggatgcggccagcctggtgaagatgccggagaacaccattctgtttcttgatgcgcgtgacgacctggccaccgccaaaacgctgtgccgtctgattcacgcgtcgggactgtccacgccgatcgtgctcattctcaccgagggcggcttcaccgtggtcaattcgcagtggggcattgccgatgtggtggtggctacggcgtcccccgccgaggtggaggggcgtttgcgcctggtttccgaacgtggcaacgcgccggtcaacgcggcatccggttcgggcgagcagggcgtgcagaacgaggatggtctgatccgttccggcgatttggtggtggatacgaatggctatacggccagtctgcacggccatccgatcgacttggcgtacaaggagttcgagctgctcaagtatctggtgcagcatccgggccgcgtgttcacgcgcgcgcagctgctgcaggaggtgtggggctacgactattacggcggcacccgcactgtggacgtgcatatccgtcgtctgcgcgccaagctgggcggcgagtacgagcatctcatcggcaccgtgcgcaacgtcggctatcgtttcgatccgccggaagaggatgagcatgaggccgcggccaaggatgcggctcacggcgagtccggcgaaagctgactttttcttgcgatcattccgttgatgttcgacgggtttcgtttgttttcgttggcctttcgctgatttcctgttgttttttgctgattttctgtcgttttttcgatggattttcgctgtttttgccgattgcgacgtttccataggttttccgcgttcgtccgcatgcgaggggtaggctggaggcatgcctcgggaatcgaagaaggcgcggatcgcgcgcatgcatcaggaatacgagcagttgtgcgtggagatttccgatccgaaatgcgcgttgaacttcaattctcctttcgaactgctggtggctacggtgttgagcgcgcagaccaccgacaagcgcgtgaacatggtcacgccggaactgttcggcgaatatcccggtccggcggagcttgccgccgcgaatcccgagcacgtcgaggacatcatccgcaccatcggcttcttccgtacgaaagcgcgcaatatcatcgggctgtcgcatgagttgtgcgtgcgattcgggggcgaggtgccagccgatatggcttcgctggtcagtctgccgggcgtgggccgcaaaaccgcgaacgtggtgttgggcaacgcgttcggcgtgcccggttttcctgtggacacgcatgtgattcgtgtgactgggcgattgcggtggcggtccgactgggcgagcccctcccctgacccggtggccatcgaacgtgaggtcaccgcctgcttccctcccgaagaatggaccgatctgtctcaccgtttgatattgcatggccgcgccatctgccatgcgcgaaaaccggattgcgccgactgccccctcaacgacacgtgtccgagcgcgttcgccgcgtgattccgacgcatgccagccgccgcgccggcactccgtcgaatcgcacccggccatcgggcgtgtagcacgcgtcaactagactcgggtgcatggatgaaaacgggcggaaacgtaatctgaaagccgaggcgacgcgctggctgatcttcttcggcgtcgcgatcgtgctcagtgtgctgctgtggctgggactgtcgctgacaggccgcaagaatcccatcacatccttcggcacgctcgtctccgactcgtcggtgaccgtcggcatcgaaggcaatgcgccgaaatcgcttgacatccgcaccgaacaaggcaccgccgtggagcaagcgctgctcggcaacgtatacgaaacgctggtgtcacgcagcgaaaccaacaaactgcagccgggaatcgccagctcctggcaggcttccgacgacggtctcacgtacacgttcacgttgaacggcggcatgacgttcgccaatgggcacaaactcgactcgtccgacgtggtctggtcgctgcagaacgccgtcaacaaccattacgtgggagccgaccagcttggtgatctgaaggaaatcaccaatcccaatgcgaatacggtggtcatcacgctcgccaagccgaatccgcggctgttgcgcgcgctggccggccgtgcaggcgtcgtgtacgacgcggaaagcaaaaccaactatgcgaaatcggcggtcggatcgggaccattcaccgtgtcaaccgcggaccaatcgcaaatcgtgctgcaacgcaacgactcgtattggggcaaaaaagccgcatcatcgcaagtgacgctctactactacgccaacgaggaatccatggccgatgccatgaaagccggcaaaatcagcatggcgctgccgctgagcgcttcaaccgcctcggaactgggcaaaaccaacggtattaccgcggacagcggcatcagcttcgacaaggtgatgctcgcgttcaacaacgacaacaacagccccttctccgacgagcagatccgcaagatgacgcgatacgccatcgatgcgaagaccatcgccaagaacgcgcccgacgcgtacgcgccgctgggagggccgatcagcccgctggaagacgggtatgaggacctgagcggactgtgctcctacaaccttgaacaggggcaacggatgcgcacgtatttcggagtgaactacatcgcgccaatcgacattctggtgccgaaggaatacgaaagcatcggcaacgacgtgaaaaccgccatcgaaaacctcaatatcaacaccaatctggaagtgctcgattccgccgcggacgtgacggaacgcatgaacgccggcacctataacatcgcgctgaccaccatgagcgacgaaggtgacgcaagcgtcttcgacaacggccagtccgtgttccatttcgagaacggcgacgcacagcaggcttacgccaatgccatggccgcgaccaacgacaacgattatcaggcccgcatgcgcgattacgcgcgcgccgtcagcgagaacgcggccagcgactggctgtacacgcgcaagaacttccttgccgtttccgatgggctgcaggggtatccgaagaatctgaccgatcgtctgctgccgttgaacagattgacgctgcactgatttttccacggttttttatgtggattttccgcgatttgcctgcgattccggcattcggttcgataggcgctgatacgacggcagttgtcacattcgctttctagactagcgactatgactgaaagccaagataacaccatcaacgcgaacctcacgccgctgcccgacaaggtcggcgtggacggtctcgaagacaagtggcgcggagtctgggacgagagcggagtctacaagttccagggcacccgcgaccgtaaggccgtttattccatcgataccccgccgcccaccgtttcgggccacctgcacgtcggccacgtgttctcctacacgcacaccgatgtgatcgcacgtttcaagcgcatgaacggctacgacgtgttctacccgatgggctgggacgacaacggcctgccgaccgaacgccgtgtgcagaactattacggcgtgcgcgtggatacgtccctgaagtacgatccgaatttcgtgccgccgttcgagggtacggacggcaagaagatcgacgccaaggaccaagtgccgatctcccgtaagaacttcatcgagctgtgcgagaagctcaccgcccaggacgagaagcagttcgaggcgctgtggcgctccctcggcctgtccatcgactggtcgcagacctaccacaccatcggcgagcatccgcagcgcgtggcccagaaggcgtttctgcgcaacctggcccgtggcgaagcgtatcagaaggacgctccgggtctgtgggacgtgacgttccagaccgcagtggcccaggccgaactggaatcgcgcgaatatccgggcttctaccacaaggtggcgttccgtttcgaagacggcaccccgatctatatcgagaccacccgtccggaactgctggccgcctgcggcgcgctgatcgcgcacccggacgacgagcgttacaagcagtatttcggccagtacgtctactccccgctgttccacgtgaaggtgccgattctggcgcataaggcggcggaaatggacaagggcgccggcatcgccatgtgctgtacgttcggcgacgtcaccgacgtcgaatggtggcgcgatctgaacctgccgctgcgttccatcatccagcgcaacggccgcatcgtcatggacaccccggattggatcgaatccgaggaaggcaagcgtgtcttccaggagaccgcgggcaagaccacgttctccgcacgtaaggtcatcgtcgacgagctgcgcgctgccggcgatctggacggcgagccgaccccgaccaagcgtatgacgaacttctacgagaagggcgacaagccgctcgaaatcgtcacctcccgccagtggtatctgaagaacggcggcaccgacgagaagctgaacgccgagctcatcgcacgcggcaaggaactgaacttccacccggacttcatgcgcgtgcgttacgagaattgggtgcacggcctgaatggcgattggctgatctcccgtcagcgcttcttcggcgttccgttcccgctgtggtacccggtgaaggaggatggcaccgccgattacgaccatccgatcaccccgagcgaggaccgtctgccgatcgacccgaccgacgatgtgccggaaggctacaccgaggatcagcgtgacgtgccgggtggcttcaccgccgagccggacatcatggacacctgggccacctcgtcgctcaccccgcagatcgtgacccgttgggaggagccgggcgaagagaaccaggccattttcaacgccaccttcccgatggacctgcgtccgcagggtcaggacatcatccgtacctggctgttctccaccatggaccgcgcgcacttggagaacaagtgcctgccgtggtccaacaccacgctgtcgggctggatcctcgatccggaccacaagaagatgtcgaagtccaagggcaacgtggtcgtgccggacaagccgatcaagcagttcggcgccgacgcggtgcgttactgggccgcggccgcacgtctgggcctggacgccacgtacgacgaaggccagatgaagatcggccgtcgtcttgccatcaagctgctcaacgccaccaagttcgcgctggccatcggccgtgaggacgagaaccatcacgtgggcgctccggcagtcgccgcatggaacccggccgacgtgaccgagccgatcgaccgttccgcgatgtccaagatggccgccgtggtccgcgaagccaccgacgatctcaacaactacgagcattccaaggctctggaagtcatcgagaactacttctggcagttctgcgacgactacatcgagctggtcaagaaccgcgcctacggcaccgccgattccaccggcaacgtgccgagcgaggccgcggtgaagtccgcacgcaccacgctgggcctgggtcttgatgcgttcgcgcgcctgctggccccgtacctgccgtatgccaccgaagaagtgtggagctggatgcatgagggcgaaggctccgtgcaccgcgcagcatggcctgtggccgacgtgtacgcggccgccgccggcgacgcatccgccgatctgcttgctcatgccggtgaggctctggccgcgctgcgtggcatcaagtcgaaggccaaggtttcgatgaagaccccgatcttgtctgtgacgcttgccgttgccgacgatgtgcgcgggtccatcgaggccgcgctgggcgatatcgccgaagctggtcgcgtgaccggaccgatcgccttcaccgcaccggctgccgccgagggtgaggacgaggccgccgatgtgacggtcgccgaaagcgagctaggcgaaccgccggccaagaaaccgaagaagtgagtctctgaggtgagccgccagcggcttttgtagcgcagccgctcacttcacccacatacgaggggcctttcctttgcatgaaggagaggcccctcgtatatcccgtcactgtctgcaaccaaccgtgcccccttttgctcatattcagtcaaaatcgcgggaaaaatgctttcgtgagcgaaaaggggtataaatcgcaggcaaaacggtcgaaatcatatccccttttgctcacgtccgtgcagaatcgccctaaatcgcaagacgtgcgcgcatagaaccgtccttatcccgttctcggctgttctcagcgtacattcccgcccctgcgcacaaacccgtacgcgaaaaaatggtttttatgggagtaatctcaacgaatgcacaagcggaggcggaaatcgcaatcaaaaccccgaaacgtaccacgtaagcgacggagcactatcggatttagcgcatcgcacaaaccgcgtgctctacagcaccggaacggacaggaggtactgcgggccagcggacgaatttccggaaccgttcccacccaatccagcctgcagcgcatcgtcgaaaacttccgcagcggcggccaattcgaccgtctcgtcaatcaaatcgccattatccggcgtgaaaccggttttcgccaagccatagccggtaattggtagcgagctggcggacgaatccgccgaaccgtcggacgaatcgccaccgctgttcttcgaagagccgtccactcccccgactttcgccacattcttcgacgtggtgtccgctgcggcgccgaacgacgggcgtagtccgcccgcgtagctcatcacatcatccatgctgatggcgttcttgtcatcgaccaagctggtcgaatcggcggtgttgttcttcgcctgcgcgcgttcggccttgcgttgcgcacgggaccgccgtttctcggctttcgcgcacaacgattggctggcggaggcggaacgcaacgtgtccagcacagaagcgtcatcggcagcgcccgattcggacgtgtcgtcatccgaatccagctggtcggcgaatcgcagcacgatctggtggaatgcgctggcctgtccggtgtgctcgctggcgtccgccaacgcggtcatcgccgcggacaccttgtcggacgcggttttgagcttctcattgtctttgatgccggcacgcacgtcggcgatcgcctgggtttcgtagctgccagccgtgcctgcggtggcacccagttccttaagccgagccgtgtatgcgtcggtgaaatccatcgaatacgggatcatggccgcggacagctgcgattggccggcactgtagtccttggagccgcgctgttgttcctcgccggcgcgcttggtgagctcgttcaccaagccggatgtgccacgctgttcgatggtgcgaatcacctcgtcgacggcgtcggccgcgccgatatgccggtatgcggcgctcacgtcgttgacggcgttggccaggtctgccacggatttagctacggaggtatcgccgttcagttcggacgcggtgccgagaatggcgggaagctgtgtggcgttgccgatcgaaccggacagatgcgtggtgtatgagcccacgtacgcgtcgatgtagccgccgaacgcctgatcgtgcgctttggaacgtacggcgatggtctgtttggcaagcgctttctcgttgtctctgagctgttccagttgggcgatgagcttgcggttgcgttgcgagccgacgttggtcagaccgtccaccaaggtggttgcgcgcttggtcaggtcaggcagtgattgctgaacgttgccttccaccgcggcgatggacagtgagctcatggtgaagtgcttcgccgtcacgtaggcgttgaaggtcaggtcctcgcccggtttgccgaccgcagccaccagggtcgaggtgttgtcggatgagacgagcacgccgtcatcggcggtcacgtcactgccgacgcgtccgggaatggtgaaggcgacgattggcgtcagattggcggtcacgtcgggtttcgtggcatgcagggcgatgcgtatgccgatcatgccggaagcgtcggaaacgtcggaaacgcttacgtcgggcccgttgagggtgaaggaggcggatattttccacggcaatgcgacaacgcctttgggaacgcgtttcgacgtggaggatccgctgttggtcaggaaaaggcggcctggtttgtcgatggaggtgtaggcgctcatcacgtcatcatgcgatgcatcggccgcgtactgcccattctgccgcaaggccgatatcgcgtcgttcacgccgactgccgcgacgggagcggcggtgatgacggcgaccgcgatcgccgcggcaagcgggcgtcgggcaccggatggacggttcgcggtggcgtggcgcatgccggacctctcaatcgcaatcgaaacaactttccaaggcatttaatgtagtgcccggcatgcccgtcggcaatggacgttcgcgcggggcgcgcggaaaacggacggctcaggcgaaaacgtcgagtacgcccgggtctcccccgttttcggcgatgcgcttgtggcggcgcttggcctcggtcaccacgaattcgcggtacatttcggcgatttccggatccagtccggcttcgtcggcaatgcgatgcagacgctcgatctgggcatgttcacgctggtaatcggccggcgcgaagcccgcacgcgccttgagcacacccacctgcgacgtgtatttgaaccgttccgccagcagcgagacgatggcggcgtcgacgttgtctatcgattggcgcagcgaggcgattttagccaccacatcggccacttcggggttgttctgcgcggtgcgcgcgtcgatgatggtttcggattcggtttcttcttctggccgaagccagtcatgttcgctgtcgctcatgggtataagcctaccgcgcaccctaccgcggcatctgccgaacagcggtcacttcgcgaagtaacgctgcagcacgatggtggtttcggtgctgaccgacaccgtgcgatggatgaggttcaacagctcttcgagcttgctgggcgattcgacgcgaacggtgagcatgaagctgggcgaaccggcgacggaatcgcaggacatgatgccgtcgatgtttttgagcttgtctggaatctcggcttcctgggagtaatcgatgggcgtgaccgcgatgtaggcgttcaccgcaaggccgcggcgctcgtcgtcgataaccgccttgtagcctcggatcacgccgcgacgctcaagcttctgcacgcgcgactgcacggcggacacggacaggcctgtcgcctcggaaaggtgggacagcgtggctcggccatccttttcaagcatgtcgaggattacgccatcggtcgcgtcgagctggctcgcaaccgtacgtgcgtctaccggaccattgtcactgttggccattcataccccttttccaacaatccactgcaccggccgcaatcgaccgtccccactgcagttccatgttctttttcttccttaccatacccactaccgcgcacataccgtcgcggaatcgccgcagtttatccggacggcgcaacgctgtcatgaaatatctttgttttatttaactcatacccccatatcgaccatatatatttttcccatttatcttttctcgtcgtatttttacctattttttaattgacaacgttgtccaaaaagtggccaatttcacgaaattcgtcgaaacgtacgcataggaaaggggctacacggcgattgccatgcagcccctcaaaccttcagattcgcttgcagccgacgactcagttgccgttggtggcgttgccgctctgctggatgagcgacgccatgaaatcgcggttggtcgctgtcttcttcaggcgtggcacgagcgtctggtaggcctgttccggctcgaggccgcccagcaggcgacgcagacggtagatgatcggcagttcctgcggatcggtgatgagctcctcgcggcgggtgccggaggcgttcacgtcgatggccgggaacaggcgcttgtcggcgagctcacggctcaggcgcagttccatgttgccggtgcccttgaattcctcgaagatcacctcgtccatcttggaaccggtttccaccagcgcggaggagatgatggtcagggagccgccgttttcgatgttgcgggcggcgccgaagaacttcttcggcgggtacagcgcctgcgcgtccacaccaccggacaggatgcggccggaggccggcgcggcgatgttgtaggcgcgggccagacgggtcatggagtcgagcagcaccaccacgtcctggccgagctccacgagacgcttggcgcgttcgatggccagttcggcgacggtggtgtggtcggaggccggacggtcgaaggtggaggagatgacctcgccctgcaccgtgcgttccatgtcggtgacttcctccggacgttcgtccacgaggacgaccatcaggtggacttccggattgttggtggcgatcgcgttggcgatgttctgcagggtgatggtcttgccggccttcggcggggacacgatcaggccacgctggcccttgccgatcggcgccacgatgtcgatgaggcggccggtgagcttgttcggcgtggtctcctgcttcaggcgttcctgcggatacagcggggtgagcttgctgaactgcggacgatgctgcgcttcctcgacgctcatgccgttgatggagtcgatggactgcagcggcacgaacttctgacgctggttgcgacgttcgccttcacgcggggcgcggatggagccgtgcacggcgtcgcccttgcgcaggccgtacttcttgacctggcccatggagacatacacgtcgttcggtcccggcaggtagccggacgtacgcacgaacgcgtaggagtcgagcacgtcgacgatgccggcgaccggcacgaggtcatccttcggctcgtcgcgatgctggtcgcggtcggcgcgatccatacgatcgttgcgctggtcgcggtcggcgttgcggtccatgcggtcggcgcgatcgttacggtcgttgcgatcattgcgatcgcccctgccgcgacgctcgtcacgctcgtcgtaatcgcggtcacggccacgcatacggcggccacggcgatcgttgcgtccacggctgtgacggtattcgttgtcttcggtctcgtcgcgacgcttatcatcgtcggcgtcttcctgcgacggcagcgtggcgaggatgtcatcaaggtcgcgcacgacgtcttcgctcttcggcccgtccgccacgcgacggcggcgacgcggctcgaaatcgtccctacggtcgtcatcacgacggcgacggcggtcatcctgcttcggagcggcatcgtcaaggcccagttcggcgagcaggtcggcgccggcttcggcgccacgatggcgacgacgcttcggcgcttcatcgttcggcttcaacgcgtccaccgctgccacggcatccgcgacttcggaggattccgcggacttggcctgcttggcacggacggggtgttcctcctgcttggcttcatcggccttcttgtcctttgccgatttgacctcagcgtctgcggcgggagcggactttggcgcgcgcacggtgacgccggccggagcctggccgccggaacgggcggcttgaagtgttgcgatcagttcggtcttgcgcatggtggagacaccacgaagtcccatctgcttggcgagctccttgagctcgggcagtttcatatcatcgagattagggcttgttgccactggtagttgcctttccttggcttccacaggcatgcgcccgcgacagctgtaaaaaagaattgcggaaaatttccgtcgaatgaaaagtccgccgcgaaacatcgcggttttcgaactgtcctaaccatacaacgcaacccagaccaacgcaaagcgggcacgcgcggtccgcccgtgcggttcgcgcaccgcgcaatcgcaatgaaaatcgcaatgaaaaagcccatgccaaaaagcatgggcttgatcaaagttacgctgcgaaaaataaataacgcgtgcgaagacgcccgtctgaggccgaaggcgtacaaaggtacgtcgagcgccggagaaagggcgtatgcgcacgcgttatttatttttctacttttcttcgtggtaggacttgtcagtgttgaccgaccacacgttgtctttcgacgtttcgccgctcttgatgtccttgacggcttcgatggcggtggccatggagtggtccatgttgttgtaacggtgctgtccgttacggccaacgcagtacaggttgccgaaggagtcgaggtagtcgacgagttcgggcatgcggtcgtaggtgtcgaagtaggccgggtaagccttcttgacgcgttcgcggtgggagtcgagcacgtcctgcgggccgttgatgacctgcatgcgggtgagctcctggatggcgaacttggtggcttcctcgtcggtcatgttccagaaggagtcgccttcctcgcagaagtattcgaggccgatccacacggtgttgtcgacgtccttgaccaggtacgggctccagttgttgaagatctgcagacggccgaccttgtagcccggatcctgcacgtaaatccagcaatccggcacgatcggcgggttgccgagggtcggaatgtcggtggtgttggtcaggcgcaggtgcttgacgagcaggccgacggtgacgaagtcgcggtacggcaggccgttggcgatttcggtcatgtccttcggagccggctggtcggaggcgtccacggcgttgacaaggtccttgaccggcatggaggaaatgaagtcgtccgcggccatttcggtgcggttgccttcggaatcctcgtacacgacggatgcgatcttgccgtccttctggcgaatttccaccacattggcgtcggtgatgaccttcacgccggcgtcttcgcagttggattcgacggtttcccacagctggcccgggccgagcttcggataccagaattcctcgatgagggaggtttcgacttcggagttgtcgcgcttcttcggcaggagcttctggaaggcgttcttcagcacgcccatgatgctcaggcccttgacgcgctgtgcgccccagtcggcggagatttcggacgggtgacggccccacagcttctcggtgtagccctcgaagaacatggagtagagcttacggccgaaacggttgatgtagaagttctccagattggtttccggcagcttgtgcaccatggacttcaggtagctgaagccggcgaccatggtgagcttgaagcccatggccttcagggtgttggcgctcagggaaatcgggtagtcgaggaagtggcggttccagtagatgcgggacacgcggtggcgcttgagcatcaccttgtcttcgatttccggatccgggccgcccggctccatatcatgctcgcggtggagcttcttgtcatcatagctgggtgcgccctgcagcggcagaacgtccttccaccagtccatgatgcggtcgtccttcgagaagaagcggtggccgccgatatccatacgattgccgtcatgcttgacggtgcgggagatgccgccgaattcgcgggtggcttccagcacggtcacgtcgtactgttcggagccaccgtccttgacgagctcccaagcggcagtcaggccggcagggccgccaccgatgatgaccacggattgcttttgcgtcactttgaagtctccttacaaacaaaatcgaagatattctacccgaaggtagggaaacgcacagcgcacctgtgcgcatgcacacaaaatcaccgccaagtccgacagcaatcgccctgatagaaggaaaaccagccgtacggcttccgccgaagactggttttccgtaggtccgctacatgctgtcgggaatgtcgatgtcggttttctgcacttcctcgacgttcacgtccttgaacgtgacgatgcgcacgttcttgacgaaacggctggaacggtagacgtcccacacccacgcgtcggtcagccgcacgtcgaagtagacgtcctggccggcggaacgcacgttgaaatcgaccttgttggccagatagaagcggcgctcggtctccacaacgtaggtgaacagtttgatgacgtcgcggtattccttgtatagggacagctcggcgtcggtttcgtagttgtcgaggtcctcggcgctcatcgtctgccttccgtgtcgcgcttgcggccacgtccaagcgtgcgccaccaagcatccttcgaggttttgcgctcatccgagctgtacggccagttgttgtcggcatcgccggccttctggtccgtcttcgccgttccggatgcttcgttcggctgcgattcctgcgatggcgcggcagacgtctcgtcggcggaggtctgcgccgtgtctccactctggcctgccgctgcggcatcgtccgcatcgcccttatgtacggagttgagttggatggcgatcgagtgttcgcgggcgctcaacgcctccttgacgcccggattgtcttcgatcacgtgcatgccgaacgcgtcgagcgagcggatcgggtcgaattcgtcgacgagcgtgtccatgacgatgaggtcctggtaacggttctccgacgcgttccacagggcatcgcgcgaacggccggacggcacgaagccgagcgactggtagacggatacggaacgcgtgttctgttccggcacggccacccaaatgcggtgcatgccgaggcccgccggttccggcgcgaagccgtacgtcatcacgcggggcatgatgtctcgcgagtagccgcggccgcggtagtccttgccgagcaccacttggatgcgggcggaacgtgcccagccgtcgatgtcgatgaggaagatcatgccgatcacgttgtcggaagaggccgcgtcaagctcgccgtcgccgtcatggtcggcttcggtgacgatggaccatgcgatggtacgacgagattccggatcccccacgccggattcgttcgatttttcaccattggaccatgccacggaacgacgcacccacgcattcacagcgccacgttcggccacgcggtccttgccggtgatgccggatgcgccgacgtacgcctcaatgacctccatgcgtgcgatgtcgtcgatggtggcggggcgcaagtgcaccatctcgcccttgatgggcggaatgacgatgcgttccggcagctccctcgcccgctggtccgtcgtctgttccttcgctgtggtttcagcgtactctgacatgattatcgttccctatgtttctcggcgcggtccctcgccacacccataccgacggtattgtacccgactgaacgccagctgggagttttgttaggcaaaatccccgtgaaacctcccccagccgacgcgtgaatcgtatgaaaaggcatgtaaaagcagataaaaagcaacaaaatgcagaaaggcgtgcgtttttacgattcctctcatcgcaaaaacgcacgcctttcgatgccatcaatcaggcaacgttcggcaatcgccggaatgtcacttgatcttgcccatcacgatcttggtaacggccttcgcgtcggcctggccgcgggtggcgcgcatgacagcgccgataatcgcgcccatcggcttcatgttgccgctcttgagcttctcgacgatgtccgggttggccgcgagtgcctcgtcgacggccttttcgagcgcgccgtcgtcggaaacgacctggaagccgtgcttcttgacgacctcgtccggagtgccttcgccggcgagcacgcctgcgacggtctgcttggcgagcttgtcgttgagcttgccgtcggcgatgagcttctcgacctcggcgacgtcggccggggtgatcggcagctcttcaaggctcacgcccttgttgttggcttcgcgggacagctcgcccagccaccacttcttggcgcctgcggcggaagcgccggccttgacggtgtcctcgagcaggtccagagcgtcggcgttgagcacgtcgcgcatctccagatcgttgaagccccactcgcccttcaggcggttgcggcgctcacgaggcatttccggcatctgggccttcatctcctcgatgtgctccttggtgatgtgcagcatcaccagatccggatccgggaagtagcggtagtcgtcggcgtcggacttcacgcggccgccggcggtggtctgcgaggcctcgtcccagtgacgggtctcctgcagaatctcgccgccttcggaaaggatggcggcctggcggcggatctcgtactggatagtcttctcgatgccacggaacgagttcacgttcttggtttcggaacgggtgccgaacggatcggacgggctgttgcgcagcgacacgttcacgtcggcgcgcatgttgccctgctccatgcgggcatgggagatgttcagcgcacgcacgatgtcgcggatggcgcgcatgtaggcgcctgcgatttcgggggcgcggtctcctgcgccttcgatcggcttggtcacgatttcgatcagcggcacgccggcgcggttgtagtcgaccagcgagtggtcggcgccttcgatacggccgtcagcgccaccgacgtgggtgttcttgccggcgtcgtcttcgatgtgggcgcgctcgatcggcacacggaagatggtgccgtcctcaagctccacgtcgaggtagccgttgccgttggtcggcttgtcatactgcgagatctggtaatcgcgcggcatgtccgggtagaagtagttcttacgggcgaactggctccattcggcgatttcgcagtgcagggcgagacccagcttgatcgcgtaatcgacggcggtcttgttgaccaccggcagggagcccggcaggccgaggctcaccggggtgagctgggtgttcggctcgccgccgaagtggacttcggccgggcagaacagcttcgtggtggtggacagctccacgtgggtttccagaccgatgaccgggtcgaacttcttgacggcatcggcgtacttcatcaacttttcagccattttgttttctttcctccgatgcttcctacttgtccagtccgtcgagccacggggtcttcagggactgccagatcgggccgttccagctttcctcgagggccgcttcgagagcggcggcgggcttgtacatgacctcgtcgcgctgctgcggggcgaggaactggaagccgaccggcaggccgtcgtcgctcaggccggccgggatgctcattgccggcacgccggcgaggttggccggaatggtggtgatgtcgatggcgtacatggccatcgggtcctcggtcttctcgccgaacttgaaggcggtgaccgggctggtcgggccgacgagcacgtcgaccttttcgaaggccttcttgaagtcgtcgatgatcagggtgcggactttctgcgcggagccgtaccaggcatcgtagtagccggcggacagggcgtaggtgccgaggatgatacgacgcttgacttcgtcgccgaagccggcctcacgggtgtaggccatcatgttggcggcggtctgcggaacgcctgccggcggcatgacgcgcaggccgtagcgcatgccatcgtaacgggccaggttggagctgacctcggacggcatgatgatgtagtaggcgccgagggagtacggcaggtgcggcagggacacttcgatgacctccgcgcccatttcctcaagcttcttgacgccttcgttgaagcgggccatgacgcccggctggaagccttcgccgccgagctccttgatcaggccgaccttgaggcccttcagatcgcgcttcatgccttcgcgggctgcggcgaccatcggacgcgggccttccggaatggaggtggaatcgcgcttgtcgtgtccgccgatcacttcctgcagcagggccgagtcgagcaccgtacgggagcacgggccgatctggtcgagcgaggaggccatggcgatcgcgccaaaacgggagacgccgccgtaggtcggcttgacgccgacggtaccggtcagcgagcccggctggcggatggagccgccggtgtcggtacccagggcgagcggagcttcgaatgcggccactgcggctgcggaaccgccgccggaaccgcccggcacgcgctcggtatcccacggattgtgggtggtctggtaggcggagtgctcggtggaggagccttgcgcgaattcatcgaggttggtcttgcccaacagcggcatgcccgcggccttgagcttctcgatgacggtggcgtcgtacggcggcacccagccttcgaggatcttggatgcggcggtggtttcgatgcccttggtgacgatcatgtccttgatggcgattggcacgccggcgagttccggcatctgcgccttgtcctcatcggacttggcgtcgaaggcgtcggcctgctcgagggcctggtcggcggagaccttcaggaaggccttgacgctcggttcggcggattcgatgaccgcaaggtgggcttcgaccagctcacggctggaaacttccttggtcttgatcttggccgccatctcggcggcggaaagcttgacgagttcggtggtgctcatatcactcctgtcccagaatgcgcggtgcgacgaacatgccggcctcggagaccggggcgcctgcggtggcttcggcctgggtcagcggggtctcggggacgtccggacgcaggtaggcttccagcggaaccgggttcgcggtcggttccacgtcgtcggtggcgacttcctggaccttgttgatggattcggcgatgacgttcagatcgccctgcagacgggtgatttcctcgtccgtgagtgcgattcgggccagatcgcccaaatgcacgatttcttctttggtgaaagtaggcatgaccctaacagtaacgcgtctgcgtgacgagcgtgtgccctatttcgtgccccgttcgcaacccggccgcgactggccgccatccgttcgacggccgttccgtcgcctggtcggcgagcacgcatccgctattgcggcaaagcgacgcttaacggcttttcttgccgcgtgccgatggcgcgatcaggcttgcggcgcggcgtgctgggcgatccaggcgtgcatggagaccgcggcggcggcgccggcgttgatggaacggaccgagccgaattgggagatgtagaccacgtcatcggccagttcgagcgctttttcggacaggcccgggccttccgcgccgaaaagcatgaggcagcgtttggggaaatggtaggtttccatgggcaccgcgccgggaatgatgtcgagcgcgatgacgcgggcggcttgcagttctgctattttcgcgtccaaggcttccagttgggccatggtttcgcttgtgttcggggcagtgccggaagcgccgtccgtcgcggctgcggagccacgcatatggaaggcgatggcggcggcttgcgattgggcggcggcgatttcgccggcgatgcgcagtttccagcattcgacgagttccgttatggatggatggttttcgacgtgctggtacagctccgtcatgagcgcgcccttgcgattccatttgtgcgggccgacgatgtgcacgcggcgcgcttggaacgcgttggcggtgcgcaccatggagccgatgttgaaatcgtgggtccagttctccacggcgacttcgaaatcgtggcgcccgcgggagtccaggtcggctttgatggccgcgaccgtccagtagcggtagcggtcgagcacgttgcggcggtcgccttcgtcgagcagggtggagtcgaagcggatgtcgtaattgggggatgacgcatcgtccgggcgtggttcgcctggatgggtttgcgaccacggtcctacgccgacctcgcggaacgtcggttcgccggatgcctgtgcggcaacatcgatgggattgggatcgtgcacgttctccccttcataggaacagcaatacaaatatgtcaaaggcccgcgcatccgcatgcatcatcatgcttgtcatcgcacattcgacgacgtcaacggcagatatgtttgcggtcggtcggcgggaaactcggtgttcagtggagttcggattccttgaacacttcgacgaacggcagttcggattcctccgaagtgaccgggttgatgaccttgatggtcgggtcgaccatgtcgacaccgccgatcagcgaggcaacggccagcactttggcgccttcgttctccaccacggagaagtcgaggctcagctcgttgccgttgcgcagggtgaccagcgatgaggtctgcacatacgatttttcagacagccaggagtcgatcagcaccacgcgtttgccggcaatcgacggacccttgatggacggatagacgaagtccatgacgaaaccgtccaaatcctcaccacgggaggcggcggcctgaatcatggcggagaccagcggcacggccgcggcggtcaatgcgccgaccgcgtcgaaatcgtcgacggaatagccggcttcctccaacgtgtcgagcaggatatggccgacgatggaggctccgcgatggtcgaacagcacggaggagagttccgagaaaggcttgtccttcatttcggcctgcagcagcgtcttgagctggtcgcgaggttcgagcatggcgaaatcgacggtggattccgtcgaagcggaaacagactggcccgcagcggaatcatgcgtcggaaccggtgtcgtcttgcggaaagtgttctcttcggtcatggttccagcctatcctttcggctcgtcattcaccgcgcggtatgggtgatttatgagcgattagcatggtcattcggcgttggtctcgggagcggacaactcgcggatatcccctttttcgggcgcgatcatgtcgacggtgccgatgaccttgctctggtcgacgcgttgcagtttgcgcgcggtgaccagcacgcgcgattcgagcgacgcggcgaacgagttgtatgcgccgaccgttttggtgatggcggaacccagtttggtggcccgctcccccaatactgcaaaccgttcgtacagctctcgggacaggtcgaacagcattttcgcgtcatcggtcaggctttgctgctgccatgcgtatgccacggatttgagcaccgcccatagggtgatcggcgaggtcagcgcgactttctgcgcgaatgcgtcgtccatcagtgtcgggtcggtttccaatgcggcctgcagcaacgattcgttggggatgaacgcgatcacgaaatccggagcatcgctgaacgcgttccaataggctttgtctcccagggtcttcacatggtctcgtaccgctttggcatgggaatgcagcagctcgttcttgcgggccagttcctccggtgaggcggtgtctggaatctcgcatgcgcgctggtagtcggcgtatggcgctttcgcgtcgatcggaatggttttgccgcccggcatgtggatgatcatatccggccgttgcgtatgtccatcggcgtcggtgaccacaacctgggtgtcgaaatcgacatgttccaacagacccgccgattccacgatgttgcgcagctgcgcctcgccccacgcgccacgcaccttgttgttgcgcaatgccgatgatagggcgctcgtctcgcgatccaatcgcgcctgctgttcgccaagacctttgagctgttcgccgagcgcgcccatctcatgcttgcggccctcttcgatttgcgcgaccttcgtctgcagggcgtcgaggttcttctgcaccggagccagtgcggagagcaccttgctttgctcctgcagtttccgttcgctttcggcttgacgacggttcgcttcttcggcggcacgctgccgttcacgttccacgcgcatttcctcggcacgctgggcctgtgccaattgcgatttgagatacgtcagctgctggctgactccttccgcctgcgtacggtattgcacaacagccgcgttgagattgctgatgtcctgtttgtccgcctcaatctgcgccttcgcctcgttcaggtcggattccttcgcgccacgggccatatcctgccctttggcacggcccgcgaagaagcccgcagccgctccaagcgcggccacgatcaccagcaatatcactacaaacacaggattgtcgaacatacgttcgatggtatcacgtcatcaggaacacatcaatccacgcatccacattcattcgcaagaccgaccgcatgccacacaaccgtgcactatgctgaaatcagccgaacgcgaaatgcatcagcccaacacgaagggacattatgggattcgatctgtttttggcggccgtgtcgattgtggccgcatccatcgccacctgggcgttgttgcggctgtttccaagctcggacgcacgccaggcgattccgctgcggacggacggcggatttgccgacccatcccacacaaccgacggtggagtgacgatagacggcaaagtgacggcagacggcgaatcggcatccgacatcgacggacaacccaccgaccacctcggcaagcgcctcgtcatcgcgcttatcctgaccattccaacgttcgtcatcacattactggcgctggccaaaatcgccatgccgggatggctgacgaatccgtggccgcacgccatcgtcatcacgccggtcatgttctattgcgcggcgccgattcaccaccgcggcctgcccgcattgcagcggcggcgtccgaacggcgattcgctggtttcgcttggcatggcgattgtttacgcgtacagcctgctgctgtgcgtggtgtcgtggattttcccggccggctcgcgcgatccgtatttcgcgttcgtcggcgtggtcgcgacgctttcgctggctggcacgcttgtccggcaacacgcgatgaccgcgcagcagacggcagaaacagaaaaggcgcaatcggcacagtcaacagaatcaacagaatcggcgcgatctcaagcgaaatcccctgagccaacgcaagaaaaaagcgcggaagaattgctcttccgcgctgtggtaggtcatgcgatccgcgcacgcgtgctgcagatcaccacgtcggtgacgatggtggtcgcggtgtggacgtgcgcgttgtggctggcgttcggcatgcaaccgaagctggcgatcgccatactgctcggttcgaccgtgctgtcggtcgcaggcctggtattgcaggcttacgaccgacaggtaaccaatcgataatcgtcactcagccgggtttgggacgtcggcggaatcgtccgtcttctcctcgcccatatcctccagctggtccgcggcccacgcggacagctccaggtggtcgccgccggtctggtccaccagcacggtgtcgccgtcgtgcacttcgccggccagcagcatgcgggcaagctggtcgccgacttcggtctgcaccaggcgacgcagcggacgtgcgccgtacgccggatcgtaaccggtgttggcaagccattcgcgcgccgaatcggtcacgtcgagcgtgatgcggcggtcggtcagacgtgcggacacctgcgcgacctgaatgtccacgatgccgccgagctcctcgcgggtcagcgggtggaacatgaccagttcgtccagacggttgatgaattccggcttgaactgcatgtgcacggcgtccatcacggccttcttcttggcgtccgcgtccatgtcgggattgacgaggaactgcgagcccaggttggaggtcatgatcagaatcgtgttcttgaagtccacggtcctgccctggccgtcggtcaggcgaccgtcgtcaagcacctgcagcagcacgtcaaagacttccggattggccttctccacctcgtcgaacagcaccaccgaatacggacggcgacgcacggcttcggtaagctggccaccctcttcgtagccgatgtagcccggcgcggcgccgatcaggcgggacacggaggccttctccatgtattcgctcatgtcgatgcgcaccatggccttctcgtcatcgaacaggaagtcggcgagcgccttggccagttcggtcttgcccacgccggtggggccgaggaacaggaacgatccggtcggacggttcgggtcggagatgccggcacgcgagcgacgcacggcgtcggaaaccgcttggatggcttccttctggccgatcacgcgcttgccgaggtactcctccatgtgcaggagcttctcgttttcgccctgcataagacggcccacggggatgccggtccagtcggagacgatttcggcgatggagtcggcgtcgacgcggtcggggaccatcggcacgtcggcgttggcattgtcggctccgcccgattccgcctcgttcttctcggcttgggcgatttccttctggatggccgggatttcgccgtagttgatggctgacgatttcgccaggtcgccttcgcgctcgtacttttcggcttgcgtacgcagctcgtcgagcttcttgcgcaggtcgccgatacggttgtggccgttcttttcggcgtcccaacgcgctttcagcccgttgagcttttcgcttttgtcggcgatttcctggttcaaatcggcgagacggtccttggcgctgtcgtccagttccgcttcggccttttccgcggccttgtcgttcttcggattgcccagcaggtacgacttctccatcttgagacggtccacctggcggcgcagttcgtcgatttcctcaggcgaggagtcgagttccatgcgcaggtgcgctgcggcctcatccaccagatcgatggccttgtccggcagctggcgtccggaaatgtagcggttcgacagggttgccgccgcgaccagcgcgtcgtcgccgatggtcaccttgtggtgggcctcatacttcggcgcgatgccgcgcaggatggcgacggtgtcctccacgctcggctcgccgacgaacacctgctggaaacgacgttcgagcgccggatccttttcgatgttctcacggtattcgtccagtgtggtggcgccgatcaggcgcagttcgccacgggccagcatgggcttgagcatattgcccgcgtccatggagccttcggccgcgcccgcgccgacgatggtgtggatctcgtcgatgaaggtgatgatctgcccgtcggccttcttgatctcctcaagcacgctcttcagacgttcctcgaattcgccacggtacttggaaccagccaccatggagcccaggtcaagcgagataagcttcttgttctgcagggtggtcggcacgtcgccggcgacgatgcgctgcgccaggccttcgacgacggcggttttgccgacgccaggctcgccgatcagcacaggattgttcttggtacggcgggacaggatctggatgacgcggcggatttcctgatcgcggccgatcaccgggtcgagcttgccttccttcgcggcggccgtcaaatcggtggagtacttctccaaagctttatacgagccttccgcgtcggcgctggtcaccttgcggtcgctgccgcgcgcggcggtcagggcgttacgcagcttatccgcggtaagaccgttcttttccaagatgtccgcgctttgattaggtttcgcggccgcgattgcgaccagcatgaggtcaacggtgacgtactcgtctcccctccgttgcatttctttttcggcttgcgatagcaccgccgacagctgcctgctgacgtccggctgcgttgtggtcgatccgctggcgctcggcagcgattgcatcgcctgatgcacttcggcgctcacgttttgcgcgttgccgcctgccgcttcgatgagcgcgcgggccatgctgttttcctgacgcagcatcgcgtccagcaggtgcagggtgtctacctgcggattgcccagcgccgccgcgttctgaacggcgtccgaaagcgcttcctgcgccatctgcgtgaacttctgttccatatcatcctccatggttcgcgcccggccgcccggccttcgctaccgggccggcgttcggacgcatatgtcgttgtctgatatgctcaaccgacttcatcgccattatattcccaaaacttgagtcccacacactcaactttttgcgtttctcaaaaccgtctttcgacacaggacggcagtcaccgacaatcaccagcgctcaccggcaatcgcaatacatacgaaaaaggcgggcagcaacgtaacgaaatcacgaaacgttgcaaacccgcctaatccaaagtccgccagcaagccgaaaatcagccgcgcaccaccacgttgcgcagatcgccgatgccctcgacgtgcacgatcgcctcgtcacccggatccagatgacccgacgcgttcggcgtacccgtcataatcacatcgcccggcagcagcgtggtgaaactcgtaatcgccgcgatctgctcaggaatgccgtgaatcagattcgccgtggtacccgacgccatcggcacatcctcaccgttgagcgtgaaggaaatcttcgcatccttccaatccacatcgtcacgcgtcacaatccacggacccaacgggcacgccgtatcaaaacccttcgcacgcgtccacgtcggatcaagaccctgcagatcacgcaacgtcacatcattcacgcacgtgaaacccagcacataatccatggcctgctccaccggcacattcttggcgatacgacccatcaccacagccaactccggctcgaaattcatatcattcgaacacagcggaatcacaatcggatcatccggaccaatcaccgacgtgctcggcttggtgaaaatcaccatatcctccggcgcatgcttgatatcggaatgaccggcctcatgcatgaaccgcgcatgcgcctcataattcttcgccaaaccgtacaccttcgacggaatcaccggagccagcagacgaatgccgtcaccatccaccggatagcgctcgccggtcggctcgacggcctggccggacagcggatagccgttcaaggccacgagatagtccttgccgtcgttcttgtcggtctgaacgaaggcgtactgcggtacatcattatgcgtaaaacgtgcgattctcatacccgcaagtctacccgctcgccacgcccgccgttctcgacatgcgtcgctttgcggacgatgccgattgctcgcattttttacgatttttgcgattatttgcgatgcagttccgcccgcaacgccgccacctcgcgttccagctcgtcgatgcggcgcacctgctgggcgatgagcaggtcgcgcacgtcacctcccgacagaatcgggacctcggctgcgttgcgcggcgcgggcagcgtcgcattgctttgcgtttccgccggttgcgttggctgcaccggctgcgataccgcagatcgagcaacctccgccgagtccgccgacggaaccacacccgccgacgccgatggcatcactccaccattcccatcaaccgataccagccggtccgtgcccatacggcaggcaatcttgcgccagcgcgcgaaacaacgttcgatgcgcttatagccgatcagcgatgggtcgagtccggcttcgcggaacagttcgaccggcgattcgcccgcatggtaccggcgcatgcagttgtgtttgaacgattccgtgtaggtgatgcgtcgcgacgtcgcttcggccaccaccggcagcgagcgcagatattcgacttcttccggactgaacgctcccccaccgttgcacatgatgttccctttcggcttggcgtgcggcggctcccttccaccgcacggcagtcgaatggcctccgtcatgccattcccctgttcggcttgcgattcggtttgcgatgcgcgcttgcgatacgtgtttgcgatgcaaggccgcaatccgattcgttgttcgcttcgtgttccatcataccggtacgaatggcgtttttccaaccatttcaggcggtactaaaccctaaatcaccagtattcgtcacaacaaaagcgggtgaaccgttgatcgctcaacgactcacccgcccgaacaagccccgttgcctgtctgctggcccgctcagaccgccatcggcgtatcggattcgcggaagcgcagcacgagcgccagtccggctccggccattaccagggccgcgatggtgaacaacgcggtgcccattgcgccggtgagcggcagctgcgtgacgttcttcacgttcttgacctggattgccttgtcggacatgccctcgtcaagcctgcttgccagaccgaggttgttggcgccgaccagcttgaaggtcgacttgccggtttcctggttcacagctagttcgacggtgaagatcggcacaaagttcttcgcatagccgctcgcgaatccggtttccttcagcgtgtacttgccggacttcaagcccatgattttcacgtcgccggtggtggtttccacatccgcgacagcgccgttctcgttcgcttcggcaaggcggtattcgccatccacaatcttgatgaacttgagcggggtctgcgaaacctcggttccctcgaacacgtggaacttcgctcctgcgagaccattggcatcgcttccgacaccgtacttgcggaaggagaagcccccggtataggagtcgaattcgaccggcgtgttccacacctcggtgtcacgggacacggccgccttgttggtaaccttgttgcccatgtcgatgatgtccttgttgaccacggcggtgtaggtgatgaccagctggccgctcttgttggccaagtcgaattccagcacggtggtggtcttgccgtcggctccaacggtcggaacggtcacgtaggtgaacggcatattcgtttccgtgccatccgcggctcgagcaacggccttgaagtccttgttgaccgtcaggcccttggatgccacgtccttcacgaagtacggatacttgtcgtagccttcggccgcgttcggaatatccagcgtgatggtgtaggcgacggtctgcccaatgctcacgccttcagtggtggtaatcgtatcggccgtcttgcccggctggtcgggctcgttctcgttcttggccacaaacatgccgacagcgttaatcttgccctggccggttgccggatcgcccttcactttgaatgtggcggccacgccgttcagcgtggtggcgacgatggcattggttccccgaccgccgtccttgtccacatcggcgatgagataccagccttcttcaagcgaaccgatggcagccgtaccgccgttgcccgtaacggttttgtcggcaacgacgccatcgccaaccgccaacgaggccgcgaatgtgcggaaccaggcggcgtcgttatcgccggtcttggttgcggcgaacgcggccggattgctgtcatattcggagggcatgctgacaacggggtccatgttgttgttggcggcggccaccgcgtcggtcacagcagtcacccaatcggcgtcggtgtcgacctgcacggcgtcgccgtccaccgtcagcgaggcgaacttgtacgcggagtaggtgtgccccttctgcgaatgccgcacttcgatcgatgcgctgccggccgcgtacgctccggccgtgccgaacgccataccgcccagcaacgttgccgccgcggcgattactgcacaaagccttctcgtcttcatgatgagagacctctcttccttggtttggtcggccttgttaccgcagccgattggttggttttatgggaagtttcgtatattgtgttgttctttagttgtgattgaaaaattgcgattgccggattgcgatcagagaattgcgattgccgtccggcagttccgtcacggccgtccgcgcccgatcaaagccagtccgacgatgcccgcaagcagcagcaccagtgccgtgacgccggccacgaccagccaggtccgtccttccgatgcgccggatagcggcagcacggccaccgtctctttcacgttggtgaacgaggcttcgtaggtggcggtctgtcccttgtcgaacgcgctccacatgtcggctctggtgatgctgatcggcactgaggtgacgttgcctttcgcgtgatagccggcgatgttgccttccgtgacggtgtagtcgcctgccatcacgccacggaatatgtactgccattcgccggtaggcagctcgtcatcttcggaaaggtctttgcccagcttcgatgcgccgccctgcatgaaatcgatgcgcaatgtggctccgctcgccggcattccgccttcccaatgtttcgtcacgaccacgttggcggacggcacctgcaatacgggatgctggtaggccgcgcaggcggactgcttgtcgaaggtgtaacagacctgcgccgacgcgttcgatcggaagcccggctttcctgcggaggtcgtgccggtgcccgcgtcgccggtcgcgtcgtagttgatgccgccgtcgaccatattgacccgcgcgtaggcgctgtcggttggcacgatgccgtacgagagcgtgtaggtcgcgttgtgcagcagctggtaatcgccggcgaattcgacgcggatcttgccgttgccggcgtcgctgtaccacaatgtgtaatcacgttccagcactggaggcgtagcccccgaagacagattcgtcacgttgagcgtcacgccgccggtcacccggtagtaggtcgctccgccgaagttccgcatgccggccatgttccagacaacgccatcgacctgcgcgtattcggacagctcgtcgacgatcgagacgccgctgtaggcgcttcccgtggtgatctccttctggatgtcgtcgaagatcttcgtcaggtcgtcagcgctgttggtggccttgtagtagccgaggttgccgcccgtaccccaattggttttgttgtacgcggtggcgttcggatagttgctggacacggcgtgcatgaactggttggcttggtcgttctccctgttaccgaacgattgctgctccggattggcgccttcgaagatgccgatgctgtagatgagcgtgccggccgatttcatggcgagcgcggttgtcacggcgtcattggcgactctcgtgctaaaagtgttttgcgtggtcggcacaccgtccgcgaagaaaatgacgactttcttcgcgcctggccttgcccgcagcaatgccgtctgcgcggcggccatgcctttgtccgcaggggtcgcgccattggcggacagcctgctcaccgatgatttcagagcggcggtatcgctggtcagggaactcaccacgccggatgtctgcccgaattgagcgatggcgattcgcactttgctgtctttgtcctggatggtgtcgttggtggtctcggtggcgtcgatgaagctggtcgccgcttctttcagcgccgtcaaccgcttcggattcgatttgttgcatcctctttggcttccgtccatgcagtagttcatcgatccggacgtgtccagtacgagcaccacttcgattttctccgtgacctcatggctttcacgggtgtccttgcccaccacgttgaggttcagtgtgtatttgccgccgccgttgtatgtgatgcttttcgcgtgatccggctgcggcacggcgacgttacgcgcggcacgcatcacggttttgcgattgaaggtgaagcgatcgcgcatgatgtgttcgtcggcgtcggcatcttcagcagtgttgccatcgttgtcagcatcgtccgcatcgccggttttgccgtcatcggctgtcgcgcccgcatcgccattcgccacagcatccgtgcgattttcgccggcatggtcgtttcgatcgccgtcttgagccggtgcagcaccatttgcaggtacgtcagcgttctcagccgtcggctgcctaaccgcctgccgttcctgctccttctgctcattcggctgttccgtcttatcgcacggctgccgctgttccggcatcgtctccgacggttgttccggttgcgattgcgactgcagttgcgattgcgcttgttcgttcgatggctgatgcgattcaccgtcgtccgtaaggcattgtgcgtcgtcatcgtccgttgcggactgtccggcaacatcttgcccggcaatgtcggcaacgtccgatccgactgcgttttcagcatcggattgttgtgtcgattccggctggctcgctgcggattcggcagccacgttgccgccatccgtcaccgtttcgtcggcgaacgcggtcgcgccggctcccgtggtgccggccagcatcgcaatcgtgacaagcaatgcggtgaattttcccatccgtgcgccacaccggcttatgaagccggcaagcgggtccttcatccacttcatgacatgtccatctctcatggcgctgcggcgaattgcctatgcgcctccatgccttgaaccttatggatgaacgttttgaaacccgtcccctccattgatgggttcggggaacgtgcggacccgcgaaaatcgcggccttcccccttatcctttacgcggccaggcggaagcgtgccgcatgattcggtgtcggggccgcatcgaccgcacgaccatgcagcacaacagcatgccgcccatcgtgcaaacgatggtcatggcgagcacgcccagttcggtcgcacgttcgtcgcgcacgtcggccggatctggcgcgggcagcggtattgcgacgcgatgcccggagactagcagccgatgcgtgttgatgccgtatggcgtgcaggtcatcaacgtcagccggtcttcgccgggcacgattttcaaccgtgagacgtcgtccggttcgatcacgctgattcggtccacttcgtatcccagcgtctcgtccatcactttgatgtacatgaaatcgccgtcgtgcagttcgtcgagccgtgtgaacatcaacgatttgaccaggccgcgatgcccggtgaccaccgtatgcgagtcagtgccgccgaccggcaggctggtgccgtacagatgccctgcgccgacggcgagcaccggttcggacgtaccatgccgaatcggcagttccacgccgattttgggcaccaataccgtgcccatgatgcctgcgccggaatccagcaggccctgatagttcgcgtccgtgtccgccgcggaaagcccggaaccgccggaaggcgccgaatcgtcggcgacatcagcatctccggcagtgccagccggtctggtagtgaacggatcggccgcctcgcccaataccggctgtccttccacggcaagccgccgattgtatgcgcgcgcccgttccaactcctccatcgccatcggatacggccatccggcaaccgtgcgagccgccgaatcggatgtctcggccaagcgccgcgcggaatgcgcctgcatggcgaacggcaacgacgcgaccaccaccgcgcccacgatcagcagcacggacacgcaccgcaccaatatgaaacgaatccgccgcagcctgcgcgcgcgaaccacatcggcaatgtcaatcgcctcgtaaaacgacggcgttccagcagacgttccagcgaacgcaacagttccggcatgaccactgtcggcagctgcaccggcatcagatccgactccggcgccattgccgatgccatcgttatcatcaccggcatcataggaatcagccgaggcgcccgccacggcaccgaacagccgcatgggcgaacgcagcaccgtatgcgcatgcacgtaggaatccgtcctgcgggcgagcagacggacgggtttactcatcaatcgagaggcagaccaaaacatgggtttctccttcgaacacacccatgttcacacccgccatacgaaagcccttgccccctataggagggcttacccctagaaagacaacggtttcaggcacgaaaccggcaattttggcaccaaaccgcgcagcaccccacctaccggcggaacgcagctcagacaagccgtttttcagaggaatgcaagtcagacgaatgcaagtcagacgaatgcaatccaggcggacgagcctcgcaaatccttaaaaaaacagaaaaagtcaaagaaagcgctcagatgaacgcacgctcaccgaaaatcgcagtgccgacgcgcacgatggtggaaccttcggcgatggccagttccatgtcgccggtcatgcccatcgacagttcccggcaacggtccgtgcccggttcgccggatgcgaggatgaggtcgcgggtcttgcgcaggtgcgagaaaccgcggcgaatcaccgtttcgtcgtacacatgcgcgccgatcgtcatcagtccccgcaattcgatgccgtccaacgtgccgattttctgcgcgatgcggatggcgtgcgccggatcgcaaccggatttcgattcctcgccggattcgttgacttccagcagcacgccgacagtaataccgcgagccacggctctacgtgaaattttttctgccaaatcgattgaatcgaccgattcgatagtgtcgaccaccggcagcactttgccgattttattgctttgcagctggccgatcaggtggaatggaatatgctccgccgcagcatccggcgcgacgcctgcgacgcccagcgaaaacccgcgttccgcgcatcgccgtgccagccctttggccttcgccgtcacttcctgcggacggttctcgccgatcatgcgcacgccggcatcaatcgcaaccatgatttcgccgatgtcgcgcgtcttcgtggcggccagcaggcgcacggagccggcttcgcgtccggcttgttcctcagctgccgcgatgcggtcgagcacacgatgcacgccgtccgtgatctcacgtgcgcgcgcatcgtcgatcacctcgttggcgaggttcttgtgatccatgtatgcagtcatcgtccacctctcgcaagttcattcgaccgccggtccgcggccggcaccaccgtttccggcatgtcggctgatatttcgataccagtgttaccagaaaaccgccgacaacgtataaagaagcccgcgcgatgacctgaagtgaagcgataaagcggtcataaattcgcgcgggctataaaaccagacggcagtagaagggggacttcaaagactccgtctacgcatttaatgcatcagataaatgcgcgcgaaccgccggaaaaaaccaataaatctgaaaactttttttcagattttatcccccttgcgcagcccctccaccaaacgctccaatttatcgacgcgatcgctcaacaccatcacctggcataccagcgattgaatcttgcccaacggcacttccgacatcgcattgtggttgtccacagccgtatcatgcggttccggctcttcggccgccttgcgcatgatgtcctcgtcacgcttccagcgtgcgatattgcgttcgatgcgcttgtgcccgatgaccgatgggctcaatcccgcggaaatgaagatcgcagtcggcttctccccctgcagataccgcctcatgcagtcgatttggaattccctcgcatacgtgattctgctgtccgtcaccgcgtcgatcgacggcaatgtacgcaggtattcgatttccgctctactgaactgtcgcttcgtcatattcgccccttgtaaatccccttttgaccggccataccgataacgcatagaccgaattgccgaaatcaccacccagaataccggatgacgcacaccaccttacgcacaccccaaacgaaacgcgcggcccgtatcaccatgcgctaaatatccttctcacactgtgagatatctcacagcgacggcacgttttcggagcacgctgcaacctcggcatggcacgtcacggcacgtccagcaacgcattccacaatcgcgtcccacgaaacccgccgttccggccgccgatgcaggtacagttgcaagcatcggcgcaaccggtctccgcatcggcaacaccgaaccgcccgccaacgacaggaaggaaccccgtgccaggtcgtttcgcacccaccccatcaggccgcatgcacatcggcaacatctatgcgatgctcggagcatggctgtccgcgcgcagccgcggcgacggcatgctgctgcgcatcgaagacatcgacgaaccgcgcgtggtgcccggcgcggccgaactgatgatggacgatctgcattggcttggattggattgggacggcgatccggtgttccaatccgctcggcacgacctgtaccgtgaggcgctgcattgcttggaaaacctgacgattgacgacgcatacgattcgccgtttgacgagcgcaacgaccacacccccgcagtcggcagcgcagccaacaacgcaatcgctggcacaaccccgctgatttatccttgcttctgctcgcgcgccgacatccgcgcagcctccgcaccgcaggaaggcgaccgtttcatggtgtatcccggcacgtgccgccggcttatcgccagcaatccggataccgtccggcagcggctggccaacggcgaccgccattcgctacgcatcgccatgcccgccgacacaaacccgcacgcaaccgtccaattcgatgacgcagtgttcggccatcaggaattcaatctggcgcacgacgtcggcgacaccatcgtgcgccgcgccgacggcctgttctcctaccagctggtggtggtcgtggacgatcttgacatgggcgtcgacgacatcgtgcgcggccgcgacctgctccggtcgaacgccttgcaaatcgccattcgccgagcgcttatcaaggcgggattccgcaaggcgaaaacgcaggcctctgcaccatcgcagcacgcaccacaatcgcaatacaccccatataaccccgaaaacccacggtatgcgcatctgccgcttatcgacaacgcggccggccgcaggctcgccaaacgcgagcgctctttggatatgggggcgctgcgcgcgcatggcgtcaccgcggaacaggttgtcggctattgtgcgtggctgcttggtttgcagggcgattccgcgcataccagtccgcagccgatgagcgccgtcgaggcgttgcaggagttcgattggggtaaggtacgggccgatacggccgaccgcagtatcagccaagacgatttcgacgcgtatttcggcctgtgacaacggctggccgggtctcgccgaattgccgagacgacccggtcagtccggaaaacagcagaaagcagcagaaaataacgggaagcagtcgacgttcagccgatccacagctccgagtcaagcggatattcgttgaccttgcagccgtccaaatgcatggattgctcctgcatcagcggcgccaactggccttcgccggcgcaggtcgtttcgttgtcgatgtgccccagccggtgtccgacctcatggttgatcaccatcgtgcggtatcgcgccaggttgccgccggcggcgagccattgttgcgtgccaccgttccaacggtcgtcgttgacgatcacgttgttgtcgaccctgcagctgtattccaccgagcatgatggcgagaacgacgtcatttccgacgcttgggacagcacgagattgaaatcgcagttgccgtccgtggattggtcgaatatggctccggcgcgtggccatccgtgttcgtcgttgaggatgcggaacgccgcgttgccgaattcgtcggccgaaccgacgtttcctttggttgcgatgcagtaatggtattgcgttaccggtttgccgctgttttgcgcggtttcctgcgctttgttcagaatcgcggttttctcgtcgtcgctcagtgccgccgattgcgcgctcaccgctttggcgacggcctgctcttcctgcgattgtttggtttccggtttggtttttttggccgtcttatgctgattggttttggctgttttcttggctggcttcttggccgacgtcgaatgcgtggcttgtgccgtcgtctgcgtgttcggcgtcatgcggaccagtagtgcgtgcacgctgcaggacgtcatcgatgcgatcagcaggaacagcacgagcaccagcacggcggccctgcggatgcgaaacgcctcaagccgttcccgttggcccattgtggcgtcggctttcggatcgagcgcacgtatgatacgacgaatccgcttcaatccagcctcccgatatggtgatgtttctctcttcggcaacagtaccagtctcagtcaacatgccgaagccgccgaccgccatgcataccacctatgcgtaaggcccgcgattccggagggaatcacgggccttaccagcatgccagacgaatgccggcaatcgtcaaagtaatgctcaggcgaacagcaccttgaacaggaacgcgccgacgatagcgcctgcgatcggggccacgaccggaatccaggcctcgccccagcgggaatcgcccttgttcggaatcggcaggatggcgtgcaggaggcgcggcatgaggtcgcgggcagggttcagaccagggccggtcgggccgcccatggaggtcacgaggccccacacgatgaagccgacgacgatggacgcggcggccgggttcgccttgccccacggcagggacaggcagcacagggcgccgagcaccagcatgaaggtgccgaagaactcgttgaggaagtagttcacgcggtcgttgtgcgcgtcggtggtgcagaaggtgccgaggatggcttcggcatcgtcggtgtccttgtagtgcggcaggtaggtgacgtacacgatgagctggcccgccactgcgccgagcagctgggcgatgatgtacggcaggacctcgttccacgggaacatgccgttgacggcctgcgcgagggtcatggccgggttgatgtgggcgccggagacgccgccgaacatcaggaccgggaacatgacgccgaagccgtagcccatggcgatgttcagccagccggcatggtagcccttggtgtttttcagttccgcgttggcgacagcgccgttgccgaagaccatcagcacggcggtgccgacgaattccgcggcaagcttggtgaagagtgtgtattccactgcagtttcctctgttgcttcttctctaacgattcttacgattcgtgcgattcgagatgaattgcgattccgctctgggcggacaacagcgcactaccttactccgtacggaggaagtaacgcggctttgggtggacgcatgtccgaaatacgaaaaagacccaagccattggcttgggtcttgtctgtgccccctcagggattcgaaccctggacacgctgattaagagtcagctgctctaaccaactgagctaaaggggcgttggtcttggcgaggtttttgttctcgctgagcacatggagtaaatatactcagaatcggaaagaacgcaaccctcggcgtgtcgcaatcataaaaccgctattttccaacgttttcagcaaatcgccatctatggtgcacatcgcgtcatacgacgaaaaatgcggcgcgatggcgccctaaaatccaagtaatcacattttcttcacattctggcgcaatgcaaccactccgacagtcaacggcacgaacttttccatcacacatttccaccgcggcgagccgaatagcacgcatcatcgtcgagcccgtcggcgcgccagaggccctttataataaggaccatggcgcgtcacaggagtatatgacgcgcatcaagaaggagaaaggcttacctatggcatgcccaaattgcggtcagccgaccatcgaaggcgctaaattctgcgcctcgtgcggctcaccgctcacccaaacgaccgcggcggcaccgcaagcgccggccgcgccggaatccgatgacggcaccatgctgtcttccgcgccgcacatggcaccggccccgcagatgccgaccgctgccgtcccgctgcccaatagcgccgcaccggcagctccgcaaaccaccgtcccgcagcccaccacaccgcaaccggcggcgcaagcacagccgaccgctcaggcgcaggcaacgcaaacggtggcaccacaggccgcgccgacgcagcagttccagtatgcgccgtccccggccccgcagccggcagcagcgccgcagccaagccagccgacccagcaaatcgcccgtccggcggccgatcccaccatcaccacgctgaccacaccgcagtccatgaagaccatgggcgccagcctcggcatcggtctcggcgcgagcgtggtgttcgcgctgctcgcatcgatcgtcttcttcatgggcaatgccgcggccagcaacgggcttgccggcattccgggcttttccgacaccgcctccttcctgggcaacaacggtgtgtccggctccggcccgaatttcttccagattctcttcaccgtgatgacgctcggcgttggcggttcgctgaatctcaaaaccagctcccagggcttctcgctgagcaatctcggcattgacgcctcgcacgtcagcgtgacgctgccggtcggactgcccggcgtggcattggcgatcggcgccgcgttcggcgcatatatgctggcacgcaggttcgcgcttcgtttcaagtggacgggcgtcatcagctcgctgatcgtcggcgtgctgtccggcctggtgctgctggtcttcgccgccatcttcccggtgacggtgggtggttcctacagcgactattccgcttccgcgtcgctttccggcgtgtccttccgcacgttctgcatggcgttcctgctgtcggcggccggtgcgctggccggctacgcgttggcacagtatgcgggcgattcgggtaacgtcttctccgccgcttggcgttgggcgcaccgcgctcgtggcttcgtgcgcacgctggtcgaatcgtttgcgatctacggcgtgctgttcctggtgcttggcctggtggcgacgatcgccatgtccgccgcgaaccatctcggcgcaggcggtctgctgctggttccgctgctgttcccggctctgccgcttatgctgatttcgctgtcctcgttcggcggcatcgccttctcgacgtccagctacagcgtccatacgatcacgttgttcaacgtgtcctccctcagccagtatggctggattctgtggatctgcttcgtgctgttcctgcttgccacgttctatatcgcgctgcgtgagaccgcgcgcaatatgtacgacccgtattacgcgggctggcagcatacgtggaaggctccggtggccgcgatggcgttctggctggccgcggagttcctgttcacttatttcgcggcgggatacgcctcgtccagcatgtcgatgacggccccgatgtggtatttcctcgtcgccggcatctgggcgttcctgatcgaggtggccgcgatgacgttcggtccgacgctggtggcgtccctgccgggcatgtggcggatcatcgtcggcggcaccgtgcagcagaccccgcagaacgtggtcgattacgtcaagtcctgcgatccgtcctacggcatgaagaagacctctgccacggcgagcggcacgaccgcaacagcgaccatgccgacggcttcggctgccgcacagccggccaatccaactactccggcagctccggccgcatcggtcccccagcccgcgacgccggctgcgccgatgcccgcgcctaccgctcctaccgctcctaccgcaacgcctgtttcacaggccgttccacaaccggtcgccccgacgtccatgcccaatacgacaacgggcaacacggcaactggtgcggtgccgttgccgcaatcgccagcaggcgcggcttctatgccggtcgcagctccgggggcaggtcagccgctcgacccaaaaactaagaagacgatccttatcagcggcatcgtaatcggtgccctgattgtgttgggcattgtctacggtgtgctcaactcgaccgtcttcagcgcgaaatccgtggcgcagagctatctgacggcgattgccgacggcaagtatggcaaagccaatggcatcgccgatccgcaggtgggcaaggaccagctcaagctgctgtccgacgccgtggcgaaggccgacaacgccacgatcgccaacccgcatatcgatagtgtcaaaaccgtcgaaggcgtggccaaggtcaacgtgacgtattcgctgaacggcaagaacgtcaacgattcgctcaccatcaacaaggacgggtcgaagttcctgctgttcccgaattggaagatctcgagcccactgctcaagaccatcaccgtgtcggtgcccaatgccgtggaatcgttgtccgtcaacggtgttgacgtgaccgcgaagaatgcggagaagtcggacagcagcacgtggacgttgcgcgtctacccgggttcgtacaaggtgtcgatcggcaagtcagggtatgtcaccagcggcatcaccatggtgcgcacgaacgcggactccgatgccgccgatctcaagatcatgcctacggccaagcttaaggaggacttgagcaaggccgtgaacgccaagctggacgaatgcgcgaagtccaccgactacgcgccggaaggctgcccgttcggcttcgacctgtacgacgaggactactaccgcaacttcgcatggtccatcagcgtctatccgaagctgtccgacatcaatctcgattacggcacgttctccacccggcagggcaaggcgaagtgcacgtatgaagagaagaatttcgacgattcgtgggagtctcaggacgacagcacccacttcaccgtcaacggcagcttcagcatcagggatggcaagctcagcgtcacgattgacgatgaggactgatgccggctaaagagcggatataggaaaatcccccgcaccaatcggtacgggggattttcgatgcttaagctcagacgtgtttcagcctgaagtcattcaccgccggtccgtaaggacgtcgagcggtgaatggggcgaaatcactcagcgacgaccttcacgaagaagttggcggtgatttccgggtgcagggcgacggttgccgggaagtcaccggtggtcttgatcggctcaacggtgatgttcttcgggttgacctcaaccttggaggagagcgcgatggcgatcttctctgcggagatgccgccgaacagcttgccggactcggagaccttggcagcgatttcgacggtggagccctcgatgatttccttggcggcaacagcctcttcgcgggtggcgacggccttggccagacgagcgcgcttcatggcctcgatctgggcggcggcacccttggaccaagcgaaggccaggccctgcgggaacaggtagttgcgggcgtagccggacttgacggccacgacgtcacccgggtgacccaggtggttgacggacttggtgagaataaccttagtttcagccattgttcaaacctctctaagatcagcggccggacgtggcgtacggcagcagggccatctcgcgggcgttcttgatagccttggagatctcgcgctgctcctgcacggtgacaccggtgatacgacgggaacgaatcttgccgcgatcggagatgaacttacgcagcagggcgacgtccttgtaatcgatctcggtgaccttggcggccttcagtggattcggcttcttcttaaacggcttgaccggcggctgcggcctcttgcgtgacatcttgatgttctccttaaaatctggaaatactgcgattaagctgcttgtttcgctgttcgcctatattgcggacggggttcggtccgtcagaattccggttcgtcgctgtcgccgccgaattcggaggaacctccgaaggactgggacgcgccgaaggaaccgaaggacgagccggagttatccgagcttgaccacgggtccgaggccggagcggactgtgcgggagcggcgttgaccggagcggaggctccaccctgatatccggcgccgccagcatagctggagccgccctgatatccgccgttgttgccgccgaaaccgccgttgttgttggcgttgttgtagccgccgcgattgccgctgaagcctccgttgccggacgagctttgacgggtcacctgggcggtcgcgtagcgcagggacgggccgatttcgtcgacctgcatctcgatgacggttcgctgggaaccgtcctgcgcctggtaggaacgctgctgcagacggccttgcgcgatgacgcgcatgcccttggacagactctgcgcgcaatgttcggccatgtcgcgccacgcggagcagcgcaggaacagggcctgaccgtcttcgaactggttcgagttacggttccaggtgcgcggagtggaggcgatcgtaaagctggcaacggcggcgccgctgccaatggtacgaatttccggatcggccgtgaggttacccaccacggtgattacagtttcacctgccatgtcgttacctacttactttgcagcttagaaagcttggtttacttacttgcgaagaatcttcgtacggatgacggattcgttcaggttcagcagacgatcgagttcgtcgctggtggccggctcagcggagtagttgaccacgacgtagttaccttcggtcttgccggcgatttcgtaggcaagcttgcgacggccccagatgtcgatgttctcgacggcaccgccttccttggtgacagtttccagatactgctcggtcagcttcttcagaccgcgctcatccagctcaggatcagcaatgaacatcagttcgtacttatgcgcagacatcacccacctccttcggactatcggccatggaccttccatggcaggagtgtgtatgcgtgctgccttcaggcatcgataagtcgcaatgaacatatggatacgattgatggcaacttgtacaggctaccccgacgccgcgacgtatcgaaacggcgtctgccgggtgcgaaatcacgtgcggaggcaagcgaaaagccccgctcgcaagcggggcttaatcgcaaaaaatcgtaataaatcctgaaatgtcgcgagagccgtatggcaatcgcgcgaaatatcaggcgtagatgttgcgcgggcgcatgtcttcgggcaggccgttgagcagcgtcgaaacggagccggattcgaacacggagcggatgccagcggccagcagcggggccacggacaggacggtcatgttcggcaggcgcttctcttcggacaccggaacggtgtcggtgaggacgatttcgcgtgcgccgcagttcttcaggcgttccacggccgggccggacagcaggccatgggtggcgacgagcgtcacggacttcgcgccggcgttgttcagcgtgcgcacggcctcgcagatggtgccggcggtgtcgatcatgtcgtcgacgaccacgcagtcgcgtcccttcacgtcgccgatgatgccgtgtgcctcggcatggttcgggcgcgtggtgtcacgggtcttgtggatgaaggcgagcggcagtccgccgagcttggcggcccactgttcggaaaccttgatgcggccggcgtccggggacacgatggtggtgttctccagcggcatgctgttgcgcacgtagtcaagcaggatcggcatggcggtcagatggtcgaccgggccgtcgaagaagccctgctcctgggctgcgtgcaggtcgaccgtcatgatgcggtcggcgccggcggaacggaacaggtcgaacatgaggcgtgcggtgatgggctcgcggccctgatgcttcttgtcctggcgggagtagccgaggaacggcgcgaccacggtgatggaacgtgcggaggcgcgcttcatggcgtccaccatgatgagctgctccatgatccacttgttgatcggctcggtgtgggcctgcatcacgaaggcgtcggcgccacggacgggctcggtgtagcgcacgtacatctcgccgttggcgaaatcgtatgcggtggtctcaagtacgtcggttcccaggtattttgcggtttcctgagcctgctcggggtacgcgcgacccgtcaccagagccagtttcttatccggagtgccttcgagaatcgccgacatgcttgccttcccaattgttcggtgcgtgaaattaagccaaactccaatataacaacgtgggtgcccacgccacgcggcttctgtggaagcgcctccccgttccgtctactcggcgtcggcgaaggcctcacgaatctgcgccgcggtgccgtaggatgcctgcgcgccatatccagtggccgcgtaggccgacacatacgaggcgagttccgcggactgcgacaacgtcatgccggaggccaggccggccagcacggtacccatgaacgaatcgccgcaaccggtggtgtctactgccttgacccgcaccggagcgatgcgctggatgcgatgctccggatcgtccgccgtgccatcaagcactacggagccgtcgccgccgagcgtcacaatcgcctgttcaaacccgaatccgcgcaacttatcgaacgcgtgacgccagtcgaacgcgtcccaatcatcatcctccggttccgcgatgccgagcagctgcgccatctcatgctcgttgacgagcaggatgtcggaggcctcgaccagctccaccggcagggagggggtgaacggcgagtcgttgagcagcaccttcacgcccgcctcgtggcacatgcgcgcggccgcggtgacggtctcgatcgggctttccaagcataggccaagcacggaagaccgtaccagcgcctcacgcacggattccacatagtccacagtgacctgcgcgttcgatcccggagagtagacgatggtgttttcgccagttgcgtccacggtgatcacggttgtaccggatgctccaagcacgcggcgaacatgcgtggtgttcacaccagcttcacctagggcgcccagcaggaagtcggcgttggaatcggagcctaccgcgccgaacatttgcacggttgcgccgatgcgcgctgcggcggccgcctggttgccggatttaccgcctggcagcagctgcagcggaccgccggtgatggtctcccccggccctggcagacgctgtgcggtgacggtgtaatccgcattcatcgagccgattacggacactgtgccgtggatgcggtccaatgcagagagaacttcagtcgcactcatctttgacttccttacattaattaaataaaaaggagatttgcggaatattgtttttcagtattcgcaattatcgcaaatctccattgtttatattgaggatgttatgtgcgattatttagccgattcctcggtttccaacgcatggttgccttcgtagatctttttcttgaagacgaagaacacgatcagaccaagcagtgcggtaccggcggcgatcagcagcaggttggaatagttggcggcgtcaccggtagcaccggtgacggaactgcctgcgagggcgttggagccgagcaggctgccgatgatggcaatgccgatggacggagatacgttcatagccagatcgttcatgccgacgccacgaccagattcgtccttctcaatggtgccgagcacggtggaaacgactggagagtacataaggccacagcccgcgtagaacacgcatgcgcacagggtcagcaccacaaaaccggagttcacgcagaatgccgcgccggtccatcccaggaacatgagggtgcctgcggtcacgatgccggccttgatgccgatcttgcggatgatcatgccggagcaggtgcccaccacagcggcgaccacgaaggcccacacgatgtgcagggaaacctgggtggtggtcatgccgtagatgttggtaccaatggcattgaagatcgggctcagtgcgtagttcacgaagtagaacacgaggatcagacagatggcgcgcagccaacgggtgttcttgaagaacgccggggtgatgaacgggttggaggccttgttgatgtagaaggcgaatgccacgaacagcagcagggagaccacgagcatccaccaggacatgtaggagaagaacagggtcaggaacgcggtggcgaagccgaagatcacgaagccgaacgcgtcgaccttctggccgttgccgctcttggacgggagggtcttgagcaggatcggcaggaacaggatggtgacggacgggatcaggaacaggaactgccatgcgatggagctgagcatgccggccgcgaacacgccgatggaagcggacagctggtatgcggcggtgaacaggccgaagaagatgaccttcaggtcgttgcgcaggtatttggtggccaccaccaggaaggcggagcctgccacctgctcgcctgcggtctgcagcactcgagcgatgatcacggtccacaggttcgcggcgaagaaatagttggccacgaaaccgaagatggagccgatgaacagggtcacgaggccgaaggtgacgagcttcttcagggagacgaagtcaccgagggatccatagatgaagcacacgatgccgagcacgatgctggggaacgcggtgatgagggacgcctgcgccggcgcgccgacgtcggcgccgacctgctggaacacgaggttgaatccctgcaggcacagggtgccgagcacgaaggtgatcagcagcggaataagggcgcggacggccatcttgttgctggtcaccggatcgtcgaacgggtcgacgggggcttgcgatggtgcggtgttgactgccgttgcggctgcgttgctggtagacatgtcagttcttctttcgcttcttcgcttggtttttgtgatgttgtgttgcgattatttcgatggtgattccgtggtgagggttgcgcgggaaacgctccgtggaacgttttccgcgcgagccgtcgttcactgcgcttttgcggcgaggccggagatgcgggtcatgaattcgttgaggaacctcggcacgtccacgccgacggcgaccttcatggtcttgaccgggtcgttgaggcgggtttcgtcgccgatggtgcgtccgcgggtcgggccgtccacatcgaccttcatgttgatgtcaagggtggtgacgagggtcgggtccaccgccacgccgacggcgagcggatcatgcagaccgcagccgcccaggtgcggggacgtagtctcgtaggccttgatgtagaagtcggtcatgtcggccaggaacttgccggccttggtgccgagatcgcgccactgctgagtttccttgtaggtgagcagggtctgcagggtcacgtcgaggccgatcatagtggtcggagcgccggaacggaacaggtagtcggcggcttccggatcctgcgaaatgttggcttccatgcaggcgttgcagttaccgggcacggtcagtgcgccacccatgagcacgatctggccgatttcgtctttgatttccggagccttcttcagtgcggcttcgatgttggtcatcgggccggtcggcacgtagacgagatccttgccataggtcttcactgcgtcgatgatgaagtctaccgcggattcggtttcgacggagcggttggaatcagggatttccacgtcgccgatgccgttgtcgccgtggatgaacgcggagattggcagtacttcgaaatggtcggtggtgctggagtgcggcaaaccctgatacaccttgacttccgggtggccgagcaggtcggtcacggccagtgcgttgcgcacaccctgctcgacgagcacattgccgtaggtaccggtgatgccgatcagttcaatctccgggcttcccagagcatacgaaatggcaagcgcgtcatcaacgccggtatcaagatcaagaatcatctttttcatgtgtgtgcctttcctctttgacgggcctgacgacggtccgccaccatacgggtgcgtcgtcagttatgtatcgaacactttctcatttatgttgtgtgttgacaagatttatgataaagcgttttatcaggaacgcaaattcggcactaccatacggcgtgttgcttttatttccagcaatttaaccgtataagaaactccgacgacactttaatcaagatttatcagcgccacccgtctcatcatgatccgcaggtatctaaaaatcctcaatcctacgcgcaggcgacctgcaccagtttcggcgtaagcacttcaacctgcggattagaaagccacgggcgagcatcccctgattccgtaccggacttggcacgaaccgcaacatcaatccgctcacgcaacataccccaacaggcggcggccaaatcagccacgctctgctcaacggtggtcatacgccaaccaagaccgaatcgtttgagaatattgtcgtaaccaatcacctgcatatcctcagtaacgcgcaacccacgttccgccatacgctgacggaaaccaagcgccatcacatcattgcagcagaacacggccgtcgcaccgccatcaataatctgatccgcagcatgatagccactaccgaaacggtaatccccctcaacgcatagcgacgaatcaaaacactcccccgcctgctcgacggcatccacaaacccacgacgacgctccgcagcactcgactccgcagtatcgccagtcacaatgccaatacgagtatgaccaccctccaacagataacgggcagccaaacgaccaccaagataattgtcaaaaccaacggcatcgcaccaaccgcactgcgtcaaacgatcaatcaacaccacagggcacgacacaagcgccacatcctcacgcaaccgctcagcagcatcgccagcgcaggactcgcgcgccggaatcagcatcacaccgtccaccccacgagccggaaggcgctgcaacaactcatgctcggtaacacgcgaatcatcggaattggccacaatcagcgaatacccctgcgcggcgcactcatcctccacgcacttggcaagcgccgcgaaaaacaagttctcaatatcaggcacgatcagcgcaaccagctgggactgcttggtcaccaagcttcgcgcgctctgattcggcacgtaattcagtttctttgccgcgtcggcaatggccttgcgcttctcctcggacacgcgagccggtcgattattcaacaccagcgaaaccgtcgtcacagacacccccgcggcagcggccacatccttcagtgtcgcacgatacgccatcaaacccccttaaaacgtttctccctccagcataaatgccatgcgatcctgacgcgcccagcatcgcaatcacaaacaaattcctttcacagcaaaataatccgcattatttccagcggtaaatcgtttctcggaagtgttttttgtatactcgcaacgttttgtctgaaatgagagccacacgagaagagaggaaccaccatgcagccaaccatgcagaaaaacaatgtgaaacagcgcaagaccatcgccatcatcgccatgatcgcagtagctgccatcgcgctcgcagccgtcgccatcatcgcagtctccaacaagcgcgaaatgacacaagccgccagcgacacctgcgcgttgaatgcgaaggcgctcgccacgcatcaggagagctttgaagaagcgcaacaagaagctgaagaagcagcgaaactcaccgtgaatgacgtggcggacggcaccacgctcgaaaccctgaaggatgcgatcacactggccaaagccgtggaaagcgcgccagcatgccccgcaagcggcaatgccagcgacttcaccaaagcgacggacgacattcgcaaatacgccgacaacctgcgcaacatcaccaacgaactcgacgcggccgccaagtcggtggtcgccagccaagaactcagactcgagtccgccgagtaagtcaggtaagccgccccgacggttagcgccgacgtcagcgccaaaccctacgtttaacggggccaaagtcatccaagtctgcaacttcgcccccattacaagcattttcgcaccacatcgggcttatatatggcagattcgacaggtcgcccggagacatttcgcttatatatggcaggtcattccggaaagaccgcagttagagggtacaaaattaccccctaactagcttgtttcaaaaacagactgccatacataggcgagatgcctccgtacaaaccccaaaatctgccatacataagcgagatatgcccatgaattacgcatctatgctgtgcaggcgcgacctcgcgtcgcttagaggcttgacaacaccttccatttgacaaaagttatcagttgccacgcaccaggagacgcaataggggccgcaccttcgaggtgcggccgtttttcatccttcaccaaacctggatctgcaactaaggctagcgaacaaaatgtacgccaaaccacacatccattccccggcgaggttgactcgcctgcaacgcgtctcctcgatcaccgcttaccgaacttcaattgtccggcttgcgccacacgaaccgaattcttactggccttgggcgcggtagcgggcttcggtggcggctttggcgggctcccaccaggcgcggttggcagcataccaagcgatggtcgcctgcaaaccggcttcgaaatcggtatgcacgggccgccagccgagttcggtacgcagcttattggaatcgatcgcgtaacgtcgatcatgcccaggacggtcacgcacccagtcgaatgcgtcctccgcacaccccataagccgcagaatcatacgcattacggcaatgttgctcatttcgccgtccgcgccgatcagatacgtttcgccgatgcgaccgcgcgtcagaatcgcccataccgccgaagagtggtcttccgtatgaatccagtcgcgcacgttctcgccggtgccgtacagtttcggccgcgcgccttccagaatggatgtgatctgtcgtggaatgaatttttccacatgctggtatggcccgtaattattggaacagttggaaatggtggcgcgcaggccgtatgtgcgcgtccacgcgcgcaccagatggtcggacgcggctttcgacgcgctgtacgggcttgacgggcggtacggcgagttttcagtgaatttgcatggatcgtcgagcgcgaggtcgccgtacacttcgtcggtgctgatgtggtggaatcgcacgtcatgcttacgggcggcttcaagcaaatggaacgtgccttccacgtttgttgtgatgaaaggttcaggattggcgatggaattgtcgttgtgcgattcggccgcgaaatgcacgatcgcgtcatgaccaggcacgatacgttccagtaacgcaacatcgcaaatatcaccttgcacaagtttgacttgcgattgcggaagaccggcgatattctgcggatttccggcataggtcagtttatcgagcacggttatgcgcacgtcaggatggttacgtgccacatagcgcacgaaattggctccgataaacccgcagccgccggtcacgatgatattgcgcggcttgaaaatctcactactcacaatttcagagtaccggcaggattgcatagccataaagcgattccacaaactggcttatatatggcagatttggaaggctgaccgttgagctagcggccaaaatgcacggtaagacgtcacttccacaaccgcaccatccgcaccgaccagcacacggttccccgatgcgatcacggttcttctagagctaaaccgatccgatgaggaaatgaaacagcactcatgattctcccacacagtttcgccccacctcaacatactagtttctgaaaaccgacaagttgtcatttttgtcagaaactacacttatccccattatcaattgcaacatgcgtgcatttgacataaaatacacattaattgcacgcaaaattagggcaggtgattcaggtgggcaatattaccattcgtatgaacgacgatttgaaagctcgagtcaaccagacactcgacgccataggcatgaatttcaacacttacgtaaccatggcaagcatccagctcgtaaatcagcaacgcctgccttttgacacttccgtgcgcgccgcggagccaaacgagcagaccaagcgagccatgctcgaagccgaagccaaggaacgcggtatcctcccagacgacgcggccaccttcaacagcgcgcaagacgccatcacctggctgcacaacaatcacggctgaacaggcaaaacgccatgattaccatcaaattcgaccaacaatttcagatcgacttcaaacgcatctcacgacggatacctcaaatcgtcacggaactcgaatatgtgatcgaagccattgaggagtacggacgcgttccggaatcatataatcctcacatgcttgatcgcccacgaggaatctactcgggatatgcagaattccatcttgccgaagggaaaatggatgtgttggtgatctactcggagcgatcggaagcgtcaacaatccgattcattcgcctgggatcccacgacgaactgtttgacggtccgttgctttagatgaaaccatcgtaggctccaacgagattcagccatcgatttccgcctaataaaactttttctcaacatatcgagcttatatatggcagatttggaaggctgaccggagacatctcgcctatgtatggcagtccattccgggaaaaccgcagttagagggtacacaattaccctctaaccggtctgtcacaaaaaacgagctgccacatataagcgaaatacgtccggacaaacgccagaatctaccatatataagaccacctgtcagaaatctaattcaagccgatcagcaaaccgccattacattacccttgatttggtgtataattaagcatgttattacccttgattcggtgtatttacggcggtgagacatggagactttcgaacgaaaagcgtacgaaaaactggcttcctggaaggattcttcccaaggaagcacagccctgctcatcgagggcgcgcggcgcgtcgggaaaagcaccatcgcggaggaattcggacgacggaactatgcatcgtatatgctcgtcgacttctcaaaagcccccgatgacgtgctgggctacttcgtcgacctgcgcaacgacctcgacgcgttcttcatgtacctgtcatccttctacggagtggaactacacaggagggatagcctcatcattttcgacgaggtgcagctgtacccgaaggcccgcgaggccatcaagcagctggcggctgacgggcgttacgactacatcgagacaggctcgctcgtctctatccgcgagaacgtcaaggacatcctcattccatcagaggaggagtcgatccgcctgaatcccatggatttcgatgaattcctctgggctttgggagaaaagccactgtccacgctcatcgcggactcgttcaagaagcgcaggccgctccccgattcgctgcacaggaaagccatgcggctgttccgtgaatacatgctggtcggaggcatgccccaagctgtgtcgaagtacgtcgagacccatgatttcagcaaagtcgacaacgtcaaacggaacatcctccgactgtacaggcaggacatctccaagcatggcggcagcgaccggatacgcatcacgcgcatcttcgacaacttggtgggtcagctttccaagaaggagaagaagttcaacatcacatcgctgggaaaggaagcgaagacccgcgattacgaggacgccttcttctggctttccgacgcgttcatcaccaacgactgtttcaattccaccgatccgagcgtgggcttgagcattagcgaggaccattcgacggtcaaatgctacgccgccgatacagggcttctcaccactctcgccctggccgactcggaacagaccggaagcaacctgtaccgggacatcctcctagaacgcatcgagatcaacgagggcatgctcgcggagaacgtcgtcgcacagcttctccgggccaacgggcaccggctgttcttctattcgcgcagcgatcgcgacgacccgtcgaaccgcatggagatcgacttcctcatcgtcgaaccgtacgagaacgcggcaatgaagtacagggtcagccccatcgaggtcaagtcatcgaaacgttaccgcacggtctcgttagacaaattcaaggcaaaattcgataagaaggtcggcaccagatacgtgctgcatccgaaaccgctggtcgtggaaaatgacgtggtcaagctgccgatctacatggcgggactgctgtagaaggcttcatgcagacagcgctttttggtgcactaccagcaaatgacgcccaacacttgcgcacgcacatgttgtccaccttgaacacatctgtttgctgcccgtcacccagttaaccttccagccacctttcagacatccgctagacactcgttcgtccacagccgaacactaaaatgtacccggtttaatcgtacagagcctccaattataaggggactatctttttgaaggatgcgacgatgcctattttctcgcccgaccgtcacgcttgtgcaccttcatacgtaaaacttactaagcagccgattacgggcggaacgtatcgccctcttgcgaatgacgaagacagcaacgcctgtgctccatccaccctttcaggccaccacagttcaaggctgtatacgcagaagtcggcaattcacgccacctccgacaacacaagcgttttcattcccaaagtcgatgcgccccatctgccaaaaacagctaacgacgagtccattgacgaagccgcgaacaacagtacccattcagcccccccatctgctgaaattcaactcgcgcaagctaacgagcatcctctgatgcaggctatcgaggtctgcaaacaatccgtacacactacggcaaaagcactctccaccgcaggacatgcagttgcaaaagctgccaacgccaccggccacgccatccataccgccgccacaacggtaaagaccgcctggcacacattcaccagcctcaaagcagttcaattcatcatcaagttcttccagagcacgtatcccctgtggaagaaacgtcatcgcttctcctattccttctacgccatcatcatcgccgcactttccgcattcgaagttatttttattcaatggggcatgtattccgaaccggaatatgaaaaaggcgtagaaatcgataaaaccacaagaatacttgacagtgttgccggacagacgacgaaattcgtaacacaaatgtggcttgagcagaaaaatctcgttctgctcaattttattattctgattgctatttatttgacgcttatttttgtattgaacagattctgggtttccacagcaatctttggaacagtgatgaccacttacgcagtggcaaatcacgttaaaatgcagacccgcaatgaacctgtgcttcctgctgatctgaacttcataaccggcggcaataccagcgaactcacttcattcattcccaaatccagccaaggcttagttaacagcgcggtgacaggcgttacttggctagtaatcatctgcatcattatgcagtttatcgatggccgcaatggaatcatacattgcacgtggcgccgtcccttcgccagtgtcaagaatttcacaggcaccctcactcgcatcgcagcggcggtatgtagtgtcgctttatgtttctcctttgtatggggattcggcaatgacgggtattggtccactcagttcgctcaaagcatgggtgacagcccacaaatctggaacggtctcgccgattccaccagcaatggccctgttgtgaatttccttcgcctggcacatacgaaaaccatggataagccagaaggctattcacaggaaaccatgcaagcaatcgcaaagaaatatgcgaaacaggcgcaacaaatcaataagacccgtaataccaatatgaccgacaacacggtcatcatgatgctttccgagactttctccgacccaacccgcgtccccggcgtcagtttctccgaagatccgataccgaacatccgtcagatcaagacgcaaaccacttccggactcatgctttcaccgggatacggcggaggcaccgcgaatattgaatatcaggcgttgacgggcctttccatggcgaattacagcccgacgctgtccatcgcctatcagcagctcgtaccttcgcttaagtgggcgccaacgatcaaccaagcttggaatgcagccaatggcagcaaaaaagcttccatagcattgcatgccttcaaccgcaatatgtatttccgagatctgaattacaagaagttccagttttcgcagttcttcgcaacggacggtaaaccgcagcttactggtcttcacgcaattgattccgcttggtatgtctcagatgagtccttttattcggaggtattgaaaaaagtcacggactccaacgagaacagattctatcaagtcgtcaccatgcaaaaccacatgccatacgaagacctctaccaaaacaacgaattcaaagaaatggatgcatcgaatcttccagcagatgaaaaactaaatctggatacctataccaagggactaaactacacggatcagtccacattcgtttttttgagccagcttaatgagattaaccgcccaattaccgtgctgttctacggcgaccatttgccaggcttttattccaccgcatattccgataaaaagaacatcctcggattgcatgagactgactatttcatttggtccaaccaagcgtcacgctcggctaacacaaagcttgacgctgtttccagcgactacacatcatcaaactatttctccgctcagctcgccgaacatcttaatgcaaaagtcagtccgtatcttgcgtttcttaccgaaatgcatcaggcaattccggcaatgtccgtgccggattcttcaggcagcagcagcgctccgacctatctggacgcgaacggcaatctcatcaagaaaaagaatctctcgaagcaggccaagcaattactccatgactatcagctcattcaatatgacatgagtatcggcaagaattacctgaaagacaccggctttgtcgatctgccggagtgactcgtctacaataggttaggattacggcagaaacgggaaaggcagtttggttatgaagattgcggttgcaggaaccggctatgttggattgtccgtcgcattgctgctgtcccagcataacaaggttcacgccctcgacatcattcccgagaaggtcgagctgttgaacagcggcaaaagtccgattgtcgatccggtgattaccgattttctggagaagaatacctccggtgagcgcccgctcgatttccatgccaccatcgacgcgcaggaagcatatacggatgtcgatttcgcagtgattgcgacaccgacaaattacgacgagaagaagaattatttcgatacctccagcgtcgaagcggcaattgccgcagtgcgtcagcactcaccgcacgcctggattgtgatcaagtccaccattccagttggttatacgcaacagcttcgagagaatttagatgacgatcacattcttttctcccccgaattcctgcgcgaaggccatgctctgtacgacaatctgcatccaagccgcattgtcgtcggagctccgcaaaatgatgccgaatccgtcgaagccgcgcaccagtttgcatctttgctcgccgaaggcgccgatccaagcgaggagttccgcatcaatcatgacggcagcaccggcatccctactctggtggtcggcaccaccgaagccgaagccatcaaattattcgccaacacgtatctggcgcttcgcgtggcgtatttcaacgaattggacacctatgcggaaagccgtggactgaacacccgcgagatcatcgacggcgtatgcctcgatccgcgcatcggcgacggctacaacaatcccagcttcggttacggcggctactgcctgccgaaggacaccaagcagcttcttgccaactacaatcaggtgccgcagaaccttatcgaagccattgtggatgcaaaccgcacacgcaaggaattcgtggcatccgaagtgatggagcgcatcaaggacgttcagaaccctgtcgtcggcatctaccggctgaccatgaagtccggttccgacaatttccgccaatccgccatccaggacgtgatgaagcagttcaaagccaatggcatccccgtgctcatctacgaacccacgctggacaagcccgacttccagggcagcgaggtcacccacgatctcagcgatttcaaggaccgttcgtccgtgatcgtggcaaaccgctggaacggcgatctcaacgacgtggatttcaaggtttacacacgcgacctgttccgcagggactgaacctcgcatgctccttccatctttagtaaaacagttatgctaattgactccaaaagccgactgaataatgtctaaacattataaaaatacacggaattccagtattgaattgctacgcatcatagccacttatttaatcattcttcgtcattttgtggtattcaacacttttgacgtttggagccaaaccttgtcaatcaaaaaggttgtgctcgaaaggattttctatccaagcggcaaaatcggtgtagttcttttcttccttatctcagcgtggtttctttgtgaatcacccacaagtctcaaggcaagtttcaaaagactctggttccttgagcgcgaagttcttttctacagcatcgcactcttcggattcttttgtcttttccaacatgcgcaaataaacacacagctggtactcaacaccatattcccgatttccactaatttatggtggtatgcaacgagctacgctgtcttcttgattctgatgccatttttcaccaaaggcttgcaaacactcggaaaacaaacacacaaagcatgctgtttaatatgtattattatgtggagcatctgcggaggcatcttcaatttcatttcttttgacatgccagaacaaaatgttcttattttcttatacctctacacgctagtatcatactggcgctggtatatcaaggatccaattcaaacgaaaataagcatattagcaattaccgctggatatgccatcacaaccgtcagcgtaatctttttatcgttcaccaatttcggaacgcagaatgacccttctttacagggaatgctaggaagaaatgaatggatgcttccggtaatgcttgcaagttttggcacttttgcattgtttaaagagcaccattttgttaataaaataattaacagcattgcaaaatcaatgtttgctgtatatttaataacagtttatccactttcttcaacgctattgtggcagaaattatttaacatctccaatatatacaattctcgagcactagtccctttcattatcatagcgggactattcattctcacctcatgtatttgtattgattatttacgtcgatggattttccggattactatcgattgtaataaaggcagatggttcgactatgcatgggaaaaattacactctatctgcaggaaaactcacattacagaaacgaatatcccctaagagataatttattgaaaactttgttgggattcaattaagcatattctcctaatcgaatctcaacaatcgagcaatcacctcttgccctgtaccttgcgggccaccaccttcatcagttcacgctgcttggaaccggtgggagccagcacgtccacatacttgcggatgggactgtcttccgcaatcgcacgctcatggtgttccggcggaacgggacgttccacaccgctcattgctgcgatcatctgcgccacgaaaggcgtttcctgcgcataattccaatataacgaagcgaaatcgcaccatggattcttccatggtttatcgaaaccggcgtaatgcacgattttcggagccttacgagaagccatgtatgccttatacacattggcgggcgcgaaatcgaaaacgccattgacacgaccggcgcagttgtgcatcacattccacgaataatccaggtacgtgaccaggccttcgcattccacgttcaaaatatcctggtcgttatagatgtatccgggttcggaggcgatttccagccattcgtggacggtatggatcttgcgcatacggtcgaggttcatcaccagcacgccggcctggaagtagccgtacgcatcgcgcatatgcaattgcttgcgcacatatccggcccgttcaccgtttttcatattgagattaccgatgaagtcgatatcgggcacagcggcaatcgcattatccccaagttcaatatcgaacagttcggcgacatcgccattgaccaccaaatcgcaatccagatacagcagcttcgaatagaacggcaacgcctcctggatgatgaaacggtaatacgtttcgatgctgatatgcgcattgctggtggtgagattgaagccagccaagtaacggctcacatcgaagaagcggatcacggcatttgggaaccgttcgaaaaactgacgtatgttttgcttgttctcgtcggagatattccgttccaatacgatcacatcatatgaacgatctttggaagcgttcttcagcatcgaatagatggtggtggtgagcatcggcacatagttgttgtccgcggcgaacaccaccggcaccacgttcttgtatccggcatcaagcggcttgaggacggcggccggctccggatgcaggaaatgcacgcactgcagtcgcttgaccttccaatgcgcgccggtgcgctgcttgtgagcgatgaagatgttgagcagccgttccgaaagatgccccaccgtacgtgtagtctgcacgtccattctgctgaaatcggttgccgccgcgaactcatcaagcagtgggaacagccattcgttgtattcgaagaagatgtccttcttcatgatgaacatgttgcagaatgccgcggttctcccattgagcacggcatcggcgtccaccttgtagtcgggatggcgcgcgcacagaatgtcatacatgtggcgcaggtccttcaaacgcaggtgctcgtcggcatcccagtgctgcttgagatttgagaatccgccgatacggcgaacgtcattcaacggcgtggtgatgacgtcccaaccttccacggcacgagcgatcgcatcatcgttgataccgtattcggcgagcgcgtgattatcgatatacgaatcgataatctctccgtaatcgttctctttgtgcggagtatcggtgaaatcgaagtacctgcggtagtggcagaagccgtagtaatcggcgtcctcgtttttccacgcccaatattgtgcggtcagctcgcaataccgcgggtttttcgtggagatattctcgccctcgtcgtcatgcaaggtgtccgtaaagcgggtcacggcgttcgccgcgcccacctgcaccggaacaatactgttcccctcggggaaagtggcttgcttatgcgccgacacgaagattttgatattcggatggtgctgttccgctgtgagaaccatgtgagatattccgccttactaagacaaacgtcctttcctcaatagaatatatgagagtactgccgaagagggacgctctacgagcttttgcacccaaatacttcgcacgagtaggataggacgtttgtgaaagactttttcgaaagcctcaagaagaggtaccactatgcgatggtggttttcaaggaactggtgaaaaccgacttccagctgcgatatcagggctcattcctgggcatggtgtggtccgtgctgaaaccgctgatgctgttcgccgtgatgtacgtggtgttcgtgaagttcctgaagttctcggatggcactccgactttcccgatttcattgctgtgcggcacctgcctgtggagtttcttctccgaatcgaccagcatgggaatgcgcgccatcgtcgatcgtggcgatctgctgcgcaagattcatttcccgaattacatcattgtggcgtccaccacgatgggttccatgatttccctgggcatcaaccttgtggtggtcatcctcttcggtttcttcgcccacgcacactacacctggcgcatcctactggttccgctcagcattatccagctgtattgccttggtcttggcgttgctctgcttcttggctcgctgtatgtgtatttccgtgatgtggcccatatctgggaagtggtgctgcaggccatgttctatgccacgcctatcatctatccgatttccatggtggcgcagaacaaggagttctcctgggctgccgacattctgatgcttaacccgaccacgcagaccatcatggatatccgccataacctactatctccggaatacgtgccaaccgtgtggaccatggtggacaacaagctgttgtgtctgctgccgtatgtgctgtccgctgtgatcctgtggctgggcatccatgtgttccgcaagtacagcgccaagttcgcggaggtgctctgaatcatgaccgaggtttcgatgactgaaaacaacactgtcgatgagcggccggtggtgctgaaggttgagcatgtggccaagtccttccgccttcctacggagcaggccaccggattgaagatggccttcctgaattggacgaagggcatcaagggctacaccgagcagcatgtgctgcgcgatatcaatttcgaagtccatcaaggtgatttcttcggtatcgtcggacgcaacggttccggcaaatccacgttgctgaagatcatttcacagatttacgtgccggaacagggttccgtgatggtgaagggcaagctggtgccgttcatcgagctgggcgtcggcttcaacccggaactgaccgggcgtgagaacgtatacctcaacggcgctctcctgggattcacccatgaggaaatcgacgcgatgtacgacgacatcgtggagttcgccgagcttgaggacttcatggaccagaagctcaagaactattcctccggcatgcaggtgcgtctcgccttctccgtggccatcaaagcacaaggcgatattctggtacttgacgaagttcttgctgtgggcgatgaagcattccaacgcaagtgcgatgatttcttcacaaagatcaaaaaagatccaaccaaaaccgttattctggtcacgcattccatggatgcagtgaaacgttattgcaataaagcgattttaatcaaagatggtaatattattgcttcgggagataaagacgctgttgctgatcaatatactctcgagaatattagaaccgatcagaaacacagtcatccgaaaaagaatgagcatcccgagggacttaatgaccgcgtccccatattccggttcattccagtctcatcaactgttgccaattgttctgatactttcaaattcgacatcgaatatgaatacaacgatgacgatggttacattgcaattgctatgaacgacatcaaacgtggcggaatcccttatgactcgggtcagaagaatctcaaggtccaaaagggacatcatattctgcacatggagatgcctctatcactatttaataatggcgaattccgtcttgtgggctcatttcgtaccgaaaacttggaggatgataagcgaacggacatgattgcctacactaatgatgataattctttgctttttgcagtcagagacaaagctaatacaagagattatgctctgttgaatgatcgtgctatgcaaatgcatctcatttcttatgacagtgaaaaataaaacgccattcatcgttaataccgcaattagcacctttgaaggaagagccaatgcccaagatttcaatcgtcattcccgcatacaatgtcggcgattacttgcaggaatgtcttgattcggtacggaatcagactttctccgacatcgaggcgattgtcgtgaacgatgcaagcccagacaatgtcggagaaatcgcagtgcaggcggctgaacaggatccacgcattcgagtagtgaccaacaacccgaatatgggcacacaccgcactcgtatggccggtgtagaaaacgcttcgggggaatatacgttcttcctggacggcgatgatgctctcaagccggacatgtgcgaacagcttgccgcggaaatcgacaaacaccccgtagacgtgctgcattatggccttactgttgtcgccgccaacgagctactggaaaacgagcgccaggccttcgaaaccttcaacaacactcctacgcctgattccaccggagaagacattgtccgcgatattttcgatgagactcgcggctacaaggtcgattggcgtgtgacccagcgtctgtacaagacctccatgcttaaggaagcttttaatgccatgactcgcgaccgtctaggccgttctcaggacggctacgagtgcttcgtggtttcagcatttgccaacagctaccattccttcaaggaatgtcgtggatacgtgtattactatggccgcgggatcagtggcaccaatatgatcgatgcagcgaagtatgcccgttattgcggccatttcaaggcggatttcgatgcagcctacgaatttgccgatgcacagcattccgacatgcttcgtgattgcgcacaaggcttccaacgcaaggcaaccgaaatccttgccaatgattggaaggtcagggttccggaagaggaaaaggcggaagccgccaagcaaatggaggctgtgttcggtccggccatcacgggacgtgaactgtaccgtttcgtgcgcgatgatgcctatgaccgaatcgtcaaagaaaacttcactcccggcatctccaagctgcaaacatggttcaatatcgcaaacaattgcaagctgccgcagaatgcggaaggacctgatgtcactcgtttccatgagatgaagcggcttgcgtccattcatatgcacgacctcaacgaacgaatcgaagcagcgaaaactatcaacgaatacaataaacagcgcatccgcatcttcgtcaccactcacaaaaacgttgacaccttcgacagcgccatcatgcagccggtgcaagtcggaccgaagaactatcgcttcccctgggcattccacgatgatgaaggcgagaatatcgccgatctcaacccacgttactgcgaactgaccacgcaatattgggcttggaaaaacatcgacgccgactactacggtttctgccattaccgccgttacttcgacttctcggacactccgcatgaggaaaatccctacggcgaaatcatggacgactacatcgatgccgccgcggcaaagaagtatggcctggatgacgaaaacatcgccaacgtggtgaagcagtatgacgtcatcaccacgccattcggcaatctcgaaaaaatcatcgataagcacggcactccacgcgcgctgtgggaagccgctcccctgctgcatgacgatgatctgaagcgttgctaccagatcctgtgcagcatgtatcccgactacaagcaggatgcacaggcgttcttcaacggcgacaaagcctgcttctgcaacatgttcattatgaagagggagatcttcttcgactattgcgaatggatgttccccattctcgaagagttcgacaaaaacaccgactacagcacgtacagcaaggaagccctgcgtacgccaggccatctgtccgagcgtctgctcaacatctacctgctgcatcacaagcgtatcggttccaactggaagttcaaggaactacagtgcgtccacttcaccaatccggagccagcggagcagctcaagccgcttgacattaccgacaagccaatcgttccggtggtgttcgcagcggatgacaattatgttcctcaattgaccaccaccgtgtattcagccatgaagaacgccgatccgcattacttctacgatgtgacggtgctgcagcgcaacatcgcatgggacaagcaggaacgtctgcgtggcttcttcaagcagttcccgaatatgaatctgaggttcaccaacgtggaccgcgaacttgctggctacgatctttccaccaataacgcccatatcagtgtggagacgtattaccgcttcctgattcagaaggttctgccgttctacgacaaggtgctgtatctcgattccgacatcatcatcaacggcgatatcgcgaagctttacaacatcgatttgcagggcaagatgctcggcgcgattcgagacatcgacttcctcgccaatctcaacgtgaagcacggcaaacgcatgggctacgcgcaaaccgtgctgaagatgaagaatccatacgattacttccaagctggcgtgctggtgctcaacaccaaggcgatgcgtgagcattacaccatcgagcagtggcttacctacgcctcgaatcccaatttcatctacaacgaccaggacgtgctcaacgcgcactgcgaagggaacgtgctgtatctgccgtgggaatggaatgtggtgcacgattgcggcggccgcgtgggcaatctcttcacgcaagcgccgaacgatatctacgacgcatatatgaagtcgcgtagcaatccgcagatcatccattatgccggcttccagaagccttggactgatccggattgcgatttcgcctctatctactggaggtacgcgcgtgagaccccgttctacgagcgtttgctcaagcgtgtggtgaaggcgaacgaaccggaaatcccagaaggagtattccgcccgcaacatgagcgcgcagtcggagaagataatccgattcgcaaaatcgtcgatccactcatgccgattggctcccgtcgccgtgatgcggtgaaggcgattgggcgtgtgatccgaggaaggaagtaatcacgttggcgcagtcagtaaagaacttcaaaaacaccagccgcaacttcgcttaccttattcccatcatcttgggaacattattcggcatgtgctcctttattggtaggcatgaaggcaaaatcaatatagggaatatacttctgtatgcaaatattcttttctatatccttttatttgcactggctttctttgctatcacaaaaataaccgcatatgcgaaccgtcatcgttcgtcattggacaaaccgtttgcgccattgcgcaggatcacattagattggtcgccacgatccataatcacattgtggtgcgccataactgcgctctggattccatatttcataacatactttccaggtgtctattggtacgatacttcatggcagctgatggagtactttgattcctctgtacctttcacagatcatcatcccttcatgatgacgtacctgtttgtcggattcgctcatattggtaaagtactgttcaacaacgctatatatggattgtatctgctaatactcatacaagctctgctgtccacgctatccatagcctgtgcaacctgctacacagccaaatacaacgtgccttggaaatgccgccttttcatggccttgtttcttgccgttttccccatcattcccatgctgtctatgacactcgccaaagacacattcaacacaccattttttgtgttcttttccatcgctttctgcgaactctggaaaactcagggaacgattctaaaatctgtaccgttcgatattttctttgttatagatgtactggctgtgtctctgacaaaaaaaacaggtatgtacatcgtaattttggcaatgatatttttagtttgcactgccattaaaagctggcggcgtaaactgggtacactgattttggcaggtattccatatctaatcgtcggcgtcgtcattccgactttcgtattgccaacattgcacattgcaccgggagaaagcaacgaaattcttgccgtccccatgcaacaagtcgccaacgtggcacataaccacaaggatgatttaagcgcatctgagataactgatatcgaacaaatttatcatatggatatcaaccaacttcaacaggcgtattgctggtacaaagccgacccaattaaagggcaacagctatcgtccgaagacgaacataaattaatcaggacatgggccgaacaactaatcaaacatcctggggatatgcttgccgcctggggaggcctctctgcagcatggttctcattcaatgtcaccgtcggaaatgaccgaaaccttagtatgttacttccaatcagtaattccggccatcactatcaaggcatcgaacgctacgtcccttgggttgataacactaaagcaggtaatgcagtcgagacgttctacatggatacgctattagctacgcccgtattcaatgtcatatggcagaaggctttctgggcaacaatacttccctccgcaatcatgttccttatactgacattcggacggcaaaagaagaagctgaatctgctaacgctcaacgcaccaatgcttatcacaatgctcgtgctgttcgcaggaccaatttcaacttatacagaagctacgcgatacgtattgcctatgctgtatatcgtcccgttgttcttgttcctcacactcggccaattgcaatccgaagatgataggtagcatatttgtcacctgtcatctcgatgacgcaatctgctttatttttgcaataatccacttgccgatgtataccgcgataccggtaagcgcatagaccacaatggccttgatgaacggatgagtttgtcccaatgtaataaaccctccgattggcccgcccaaagtaaggttcacaagcagcagatggaacatatacacacccagcgagacgctggatactttacggatcatgagcttcatcttgtcggaaccgcgctggaaaaacggctccagcgttttgcaaagcataaatagcgacactgccgatgtcacacaaagcggagaagcggtgccgacaagatagttatagtactccgttcccatcgtttcttggaaaaagccattccagcacagtcctccaaggaacatcaatgccgcagacccgacgaataaacctgcccaagccggagctttccatcgcaccggcaagccataattctccagataatatccgagcaagaaatacaacaaggcgctggacgagaacagcggccagctcagcaatggactaaagtatttttcattgattccaatggcgttaaccgctggaatgagaatcgaacagaacaacgtcaatgcgatagcatattccatgagacgacggtcatggacgattttcgaaagcagcggagtcaacagatacaaataaatgatggagtacaggaaccagtaaatatcgataatagagttggtaaggaatcgcttgcagaaatcaacaaagccaaaactatcggcgattggctgcgctccgtagaataaaccggggagcaggccaaacaacagatagcatgcgatgcttcccagaatcagcgctcgccccacccgcacgaaacgttttttaaaaaacactttcgtcgaatatttcttccgataatccagtaaattcataccgctgaccatgaagaaaatcggcaccgcaaaaatgaacaccgcctgcatcagctcctgaaatgcccataaccgggttctctgaggcgagaacacacccaaagatgtgtgcaagcagaccaccgcaaaacaggaaacgatgttcaatacatcaacaaacacaaaatgcgttcttgctttgccgtttttccgttcactcgcaaagccccgttccgtggccaactgttcctctgtcatcgactggcgttcccttcttcctgacatacgcacttcagcataacaaataatgacgtcccttcttgacggaggactgcgagcctgcgtccgctctcgcccctaggctataaaagcaatgaattcccattaacgtatcggaagatcaagcatggcaaatagattcagaaacagtcatatctgcgttgcagaacggattcgtaccggctcatttgtccgagcgttcaggaaccctttcgcgattctacttgcctttactctgctattcagttgtgcgtcagccagcgctgcggaagacaaggaaacagaccaaaacggaagtaagttgactttgccaagctatgtgatggacggcatggttctgcagcagaacaaaatcaccactctgaacggttcaacagcaaaatccatgtcagggcaaaccatctcagtcaccttacgcggaggcaaaaaccaatataatgcttcatcgcgaatctctaaaaacggaaagttctcggttcagctgcctaaaatcaaaggatcactcacccaatacaccatgaaatttatggtggctgacaccatggtaaaaaccgtgaatgatgtatacgtcggcaatttgttcatcgcttctgggcagtcgaatatggaaataaactacaacgactatttcaaaagcgattcgcttttcaagacaagcacctcattgcactacacacgcaacgatattccacgcagcatcaatgacaaatatgtccattttctttcaccgaacaaggtcctcaacacaaaggattatccgctgagagattttgagaaatcctggctttccgccacaggagatgacgtcaattatcttggctatattcctcaatattttgcacaacagcttcgcaaacaatatccgaatatacctatcggcttcattcaagccgcttggggagggacagctatatctcaccatataaaaggcggagacatctataaaagtcgtgttgccccattacagggacttggcgtggccggtgtgttatggtaccaaggtgaagatgattccggatcgatggatctggcattacgatatgacatttccttcgccacacttataaatgattaccggaatctatttgatgacgctacattgccgttcctttacgtgcagcttgccagatatgacggctacggttacatctatgacaccatcgttcgtaatgcccaattgggcatgcttaacaatcccgtcattgaatcgcataaaaatcttggcatgaccgtctccatcgacacggacaaaggaacgtcgaaggcaatccatccactcggcaaggaaatcgttgcccaacgtatggccaaccaatggatcgccataaacgagcgcaaagcagtaccatctggcccgttacccgaggaagcacatcttgactcagacgacaagtcaacggccattatcactttcaaagaaggcacagccgtcaaactgcaagcaaagcaaccgaattacacaatcagtgcaacaatcgacaatattgcaaatgttaccaacactccgctgtcaggattccaggtcgccgatggagacggagccatgcacaacgccaccgcaactattactggcaatacacttcgtatccactccgacgaagtgaaacgtatagctcaaatccaatatctatggcaaagcaatcccaactgttcaagcatcgtatacaacggctcaaacttgcctttgagtccgttcaccctcaatatgaatcaataatcggtctcataccatcatgctatatcggccagtgcaaaggatatagtgggattcatgcctgataattcgaacgtttccgtcgccgtgcttcttccctgctacaacgaggaagtcaccatcggcaaggtggtgcgcgatttcaaagccgcgctgcccaatgccgacatctacgtgtacgacaacaactccaccgaccacacggcggaaatcgccaccagcgaaggcgccatcgtccgcaaggagccacgtcagggcaagggcaacgtgatccgcgccatgttcgaggacatcgacgccgacgtgtacgtcatggccgacggcgacgacacctaccccgcggacgcagcccctgccatggtggacaaggtcctcgaaggctacgatatggtgatcggagaccgtctgagttccacctacttccaggagaacaagcgtccattccacaacttcggcaaccgcttggtgcgcggttccatcaacggcctgttccatgcgaatgtcaccgacatcatgaccggataccgtgccttctcgttcacattcgtcaaaacctaccccgtattgtcgcgcggcttcgaggttgagaccgagatgaccatccactcgttgaacaacaacctgcgtctgttcgagatgccaattcagtaccgcgaccgtcctgccggatccgtcagcaagcttgacaccgtgggcgacggcatcaaggtgatgagcaccatcttccgcatgattcgcgagtacaagccgctgccgttcttcggcggacttggcgccatcctcggtatcatcggtatcgtgctatgcggcagcgtgaccgtggacttctggcacactggcatggtggcgcgattccccacgcttatcggcgcggtcatgctcgtcattgccggactgctattgttcatcactggcatcatcctcgatgtcatggccaagaacgaccgcaaagcattcatcattgacgccaatcaattcgccatgatgcggcgccagaaatagcacagattccaaatatggctgagagcagaaagatacttgtcctcagccatattttattggttaatttgtctgctatttcacccacttttgggcattcgtgccatttgcggcatatagctgcacattggcaccattcgaggtagaagcacccgaaacatcaaggactttgttttccgcgagcgctgactggaaagtgtatgagccatcggagtttttgatggcgatccacttctgggcgtatgtgccgttcgaggcatattgctgcgcgttggcaccgttggcagtgctcgcaccataaacgtccagagctttgtctgaattcgcactggttagtgtcacataaccgttgtcatcgtgcgatactctccatctttgagcattcgtgccattcccagtccaaagttgcacattggcgcagtccgaacgggacgcaccatatacgtccatcttcatgttcgtctttagctttgaaccgaaagaatatgtgccatcaggcaaatcctgcctatgctttgccgcctgctcattcaaacggtcgcgcatggttttagacttctcgatgatccattgctgggcagcggtatcatttggcgaatacagctgcaatgcgacgttggacgaataattcgcgcccggtacatcaatagctttattcgcgttcactgacatcaatgagattttcccatcgccatagttgcgaacagtccattgttgagcaaccgtaccgttactgtcatattgctgtagaaccgcaccattggacgcagaagcgccataaacatccagtaccttgccggaattcacattgacaatgttgtaggttccattgccaatctgctggaaacggaatttctgtgcgttcgttccattagccgcatacagctgaattctagcgctgtttgcggtagaagctcctggcacatcaaatacaagattggatttccctgcggatttgatgttcaccgcagcatttaccggtacactaacttcgctagaggaaacaacgaatcgttgagcctgagtaccgtttggcgcataaagacgaatcgcagtaccgttagaggtgttgccaccgctcaaatcaagcacccaattacccaaagccgactgcagataatatcccgcaccggaatcacgaatgaaccaccgctgtgcattcgttccattaattgcatactgttgcaccacagaattattacccgctgccgctcctcgaacatccaaggctttatcggaattcacattggtaatcacatagctgccatctgattgtttagagaatttaaattgttgcgctttagagccattaccagaatatagctgaatagctatggaatcagacgcgttggctcctggaatatccacgctggaagacaccttggaatgtaaattgatgaaataattcccatcaggaacactcaccacaggcatcttgcgcacatcaatgacggacgagtcctgggcataattcttgctgccaaaagcattcatgtccacggaaccgctgatgccgttgatatggccggaactggtgtattgccagccgcggtcgttggtgccaaaggcgttgtatcccatttgagcaccatactgggccacccaacgggtctttgcgtagatgctcgaattgttcagcgggccttgcagatagctcgtgtacgaatacacaccgagattcttgtatccggcggactgcagtgcgccataccaggcgtcggccataccgctataaacattcggattggtcggcggggtatgaccagcccacgtccacttctccaggtcataatacacagggtatttcagatcgttcgggctcacgcccatctggcggagtttggcagccacatcattgccttccgcacgtgcgcagttcgcatcgtatgcatacgaataccagtagatgccaaaaggaataccaagacgtttgcattcattgatgttgcgctgcgccttggcatcggcatagttgccccagccataacccaaacggatgatcgcaccctccacaccatcggccttcgccttggcccagtcaatgtcatactgccattgggaaacatcgatcacacccttggcctgctgtgcgaagaggttgttcttatagtcgaaaaatgcctttgttccgttgtaggttccccagtgtgctccgtattcgttgctctcgaatttagtgagccggacagtcgagccacccttcaaggacgactgctccgcagactgtttcacaggttgttccacagcatctttcacatccgaggcactcaccggaatgaatgattcgccatccgttttggccagtggatcaggttgctgcgattgcgtgccgaccagctgagcgtccgtcacggtttcgccggtctcaatgttctgtacatcaccttccggcgtaaccgcaaggttctccgaaaccacagtggaatcgtccgaaatgttttcgcttaccgtttccggcagcgtcgcgttcggattgtccggcatgctgtttgacgaattctgcacatcatccacagttgcggcaaaagaacttggcgcatcctcaatcgcaatatcctgcatggcgtaagccggcaccacggcaacggaaaccgtcattgcagccacggaagcggtggtcgcaatcttcattaagcttttcggcgatatcatcgtcagcctctctcacaaaacgcattttcactcgttgacgcaattgcacacgcaaaacttaagtgtattctgagatgtccccacttaaaataaagcagctggattccagaccaaacttcacatttaccgaatatgccacaacatgaagtgctggcattcggaagtggaacgggtaacataccttatgtattgtcatttgggaacagaggaccttgtcggaccacctccaatagacaacatcaaaacggtatcgcggactcctggagggaagcatggcacggcacgaaaggcagccaaataaagctgacagtcaagcaagtaacgtccgcaagccccgaacgttcagcagtaccgcgaccgtcgaaaccagcaaacccgacaattccgttaacatcaccaatcgtaacggaaagcctgaaacagacgcatcaggggtttcctatcaaacaaacaccaaagatccattccaaatcgccatatcgcaaggcgtgcaagatggcgacacttgggtacataaccatgtcaagaacttgattcgccgttccatcatcgtagccgttatcgtcgttgcggtatgcattgtggtcttcggcgtcatgggcgtgagaacatcgcagaaaatgcgcgaactgaatgccattaacgactgcagagacgcggttgccgccatgaacgcttcatattccaaggatttccagctcaagggaaagattgtcgacgcattttccagcatggattcctcatatgatctggaaaagctcagcaccttgtatcaggaagaagtcaaatcgccgaaggcgcttgactgcaaagccgacccgtccggaaccaccagcaaagccaacaccgaacgagccgcatatgacaaacaggccagaaccttcgagcgggcgttgacaaagaacgaggcaaatcagaattgaatacgaaacgattggcaagaacggcacttgccgttatcgtaaccgtaggaatagtcgttgccatcatcgtcgggtgcggccccaaatggggcaacggttcagcattgcaccaaaacgaagaaaccgcacagtcctcaaattcgcaggtttccgtgactttgccttcctactacatggaaaatatggtcttccagcgcaatcagccgttagtggtcaaaggaaccgtcaaattcgcgcatgccagcaaacagattgacgcatcgaaactatccgcaacacttgcccaaggcaagatgactgcgagcgccactgcgaaaatcgcaaaaaatggttcgtttacttgcacgctgaacgcacagaaagcaagcctcgagtcgtattcgttacaggtgaagtacgacggcaaagtcgtaacggaactggcgaaagtgtatgtgggcgacgtgttcgtggcggccggccaatcgaacatggaactcaactatacgcagtattacccggagaacagcgccaattttggcaacggaatcatcaaagagaccgatcttccaaaaccactcgtcgacaagaacgtgaaattcgttatcgcagatcatgatgtgaagaacacggattttccgctggccaacgtcaacctgaacgctggcgcgtggctgaatgcggattccacgaactcactgcatttgagctacttgacacagcagttcgcacttcagctgcgcgcgaagcatcctaacgtgccggtcggcatcatccagaccgcgtggggcggcacgcctatacgcagacatgtgcgcggcggagatatctacgcgaaccatattgcaccgttgaaagattttcatgtggcaggtgtgctctggtaccaaggatgcgacgatgcgatgaattttgcgaccgccacggagtatgagtcgcagatgaccgcgctgatcaaccagtaccgtaccgtattcggacgcaagaatctgccgttcctgtacgtacagctcgcgcgctggccaaactaccagtacacgcaaaacgtgcgagaagcgcaacggactacgcttggcaacaccaacctgcacgattcgtcaaacgtggcgatgacggtttcccttgacacagataagggcacatccgcgctaatccatccgctcggcaaggatattctcggggcacgcatggccgcgcaatatctcgccatggaagacggcaccaccgtacccaacggaccgcttatcgaacgtgcccggcacactgcgaacggcgcaatcgccttgtctttccggaacggcaccgcaagcaggctgaaagccatgcagccgaactattcgaaaaccgcgagcgcaatcgcaccaaactataagagcgctccgaaagcgaccccgttaagcggtatcagcaatatcgccgctcccaccactacggcattgcaggggtttgaggtcgccaattattccggtcaatggcaggcggtcaatgccactatcaggggcaatcaggtgttgctcaccgcagccgatggttcaacactgaacgatctcaacgccatgagccaggtacgttacctgttcagcggcaatccgaagtgcgcgagcatcctgtacaacagccttaatctgcctgctagcccattcatcactattgtcgagtgatctttgttgggggccgccgcgagataaaccaatacgggcgggataagtacgggcggtctgagccgttgcttggcctgcttggtcatgttttgagcaggctgttccggattctggtttggtttctggtttcctgcttaaactatgaagactgctgcagcatcgcagaaactagacaaatgtcatttttccaccggtttatttaggcacattcccctcctactatggcatacggaatgaacgcgagcgcacaatcacagatcgaatgcaaacgtgcgcaggagaggaatcaccatgaggaatcgtattgcagcagctgcagcggcgggaatattaaccatcggcatggccgccttgccttccgcggcttcggccagtgaagtcgcaccgtctacggacggattggccggcagcaccgccatcagcgggcagatcgaccaggatatggccgtgtgcaccgacaaagcgtgcgatgccgtacagcatgtgcgcaaaaccaaccagcagatcaagtcggacatcgataccgccaagcagcacgccgagcagctgcatcagaacgcgcacgaggacgccgacgcgcttcgccagtacggcgagcaggcctggaagaactaccaggaggaccgcgaggatataaagaatgcgattgacggcgcggtcaagcgcggtcaggagcgccacgacgctctgcatcaggatatgcaggacacgcaggcccacctcaaccagatgcatgccgatatgaaggagacccacgacgaactcaagacgaggcatgacgcgtttgcggcgagcagccaccagtggcatcagtcgttcatcgcggcgttgaaggacgcgaactccaagacgggtcagcagggcggctcatccgttgctaccggcacgcatggcatcacggctggaacgaatgccggtacgaccgttactggagtcaacggcaccactggcactgtgcgcacggctgccgacactggcacgaatggtgccgcaactggatccgtcacagcttccggcgatcaaaccgccgcatccaccggcgcgctgaccaagtcggaatatggacagcttgcacaaaccggcatcggcatttcccttgcctgcgcagccattctgctgcttgccggccttgcctacgccatgaagacgttcgtgcagtataagcgcgaaaccagcgaagactgagccggctcgctgccggacagcgtttgcttcatcgactcatgaaaaacggtctcgaatatatcgggaccgttttttcatgcgcgtttttcgtatgtgcttttcatctgctatacgcattgttgcgattcaattggaatgacgtagtacagcgacgtacaatgcagcgcgaagcgcgcgtaccgtgcgtgaaccgcgtgtatgtccagtattcccactgatttgttacgttggccgttctgatcagtccactggtcaattcgcataatggggagcactgctggcgattcgcggcgacggcgtatcgccattccccgccgtccgtccggtactacccgcgctccccgcatcgccggccttttcagcattgccgatgttggttctacgcaacgaccccgcggccaacgagcggatggatcgcctgcgctgcgcctgttccgtctgcgaagcggactgaactgcgggaaaagcgcccgttacgggacgaatacgaccggttgcggtcggaataaagcttggtggcaaaacctgcgttgtgatggcgcttatggatgccatttgcggctgctgcgtattatcaggaccatccacagcgtctttttctttcacggtttgcgattcttccgcacgattcacgtcatcattcgcatcctcgcccgtttgcaaggcagacccagcttcgctctgcttttcttgtttttcctgcttttcctgcggagcggcctgcacatcactctgcaatacgattggcgatgaattcgaacggcgtcgggcaagcgccgccagagagtcacgagtatcagcatcgcgttggtcagtctgctggctgccggcagccgtcttgtcaaccatcgtcgtgcttctttctctcaacgtcacgatttcgagcgtaacgtaacgcagcgcaaaagtgcgcgtaaaacgacgatgtacgcaactcccccaccgaatcgcaatcaaatatcgacatatgagggcaaacaatcccattattgagaccacagactggcaccaataagccgcagcatggcaatcagagactttcctggatgccggcccgtacacgcgagacttgcgatacgggacgattcaaaaaaccgaggccaacgaaagaagcattcggagggaatctggaaggaaccggaaaacggagtggaaaagaaggaaccccagaaaccgaatgattccaacggtttccagggtttcaatccgggcggagaatacgagattcgaactcgtgaggctgttacaccaacacgctttccaagcgtgcgccatagaccactaggcgaattctccaattatgcaacgctttccggtgtctatccgttaagcgcaacttgactagaatacaacaggagcagcaaaaagccaaatcggcgtgtcgcactgctggtttgcagagttgggcatacgtgtcaaggttgtgcaacaggtatgagcgatcggctgcctttactacggatacttcttatttcgcacactgtagatgctatattgccgccgatggaatccaataggcaacgggattcggtaagcatgggaaaagatacgaaaaaagggttcctggagcgacgcccgccgggaagctcggaaagagagcatgaaaaaagggacctcccgggagccaaaggctcgaccgggaggcccgatacgtttgaagcggcggcgtgctactctcccacaccctctcgagtgcagtaccatcgccgcgcctggccttagctaccgggttcggaatgggaccgggcgtctcaccagggctatgaccaccgcaaatctaatggccacggcaaggaaaccaaaggaatccaaaccggcatgttatcggtggcggtttgggaaccggctagcggacgcgaggcaaacgcctatcgtttgaatcgtttcgtgaccatcccaacgcatattgccgtccaggacgatccagcacaggaaagacgcggaaccaaccctccacaagaggatcggaattgttgtgtcgccgtcgcccgttagtaccggtcggctccacccctcacggggcttccacctccggcctatcaaacacgtgttcaacatgcgggctacaggatctcgaagatccatggaatcctaatcttggagcaggcttcccgcttagatgctttcagcggttatccctcccgaacgtagccaaccggccgtgccgctggcgcgacaaccggcataccagaggttcgtccacccaggtcctctcgtactatgggcaggcctcctcaggattccaacgagcgcagaggatagagaccaaactgtctcacgacgttctgaacccagctcgcgtgccgctttaatcggcgaacagccgaacccttgggacctgctccagccccaggatgcgacgagccgacatcgaggtgccaaaccatcccgtcgatatggactcttgggaatgatcagcctgttatccccggggtaccttttatccgttgagcgatgccgcgcccgtgcgccggcaccggatcactatctccgactttcgtccctgctcggaccgtcgtcctcgcagtcaagcccgcttgtgcgattacactcgacacccgattgccaaccgggctgagcggacctttgagcgcctccgttactctttgggaggcaaccgccccagttgaactacccgccaggcactgtccctgacaaggatgacttgtcgaggttagacgtcaaacgagaacagagcggtatttcaccttgcggctccacatgagctggcgcccacgcttcgaagcctcccgcctatgctacacaatccgcgcctaacgccaataccaaggtatagtaaaggtcccggggtcttttcgtccttctgcgcttaacgagcatctttactcgtactgcaatttcgccgagctcctggtcgagacagtggggaagtcgttacgccattcgtgcaggtcggaacttacccgacaaggaatttcgctaccttaggatggttatagttaccaccgccgtttaccggggcttgaattcaccgcttcgtccccgaagggattgacggatcctcttaaccttccggcaccgggcaggcgtcagtgcatatacagcggctttcgccttcgcatgcacctgtgtttttggtaaacagtcgctaccccctggtctgtgccacccaccaaagctccccgggctagccggttcaccccagcgggtctcccttataccgaaggcacgggagtgatttgccgagttccttgaccaggattcgctcgatcgccttggtattctctacctgaccaccagtgtcggtttggggtacgggcggccatggccctcacgccgaggcttttctcgacggcctggacaaccggatatcgagccataacggctcccatcatcacacctcgccatgcgcgccatgcggatttgcctacatgactggctgcgtgcttgaccacggaaaaccacctccgcggccggctcccattccgtgtcacccctgcgctgacctactgcggctacggtcccaacgccacgcggcgacaccaacccgaaggaaggaaccaccacgaggcggaggttagtactcaccgtctcggttttgccggtccatggtcggtacgggaatatccacccgttcatccattcgactacgcctgtcggcctcgccttaggacccgactcacccggggacgacgaacgtggccccggaacccttggtcatccagcggacgggatcctcacccgtctctcgctactcatgtctgcattctcactcccacgaagtccacggccggtttccaccgccgcttcgcccctcgcaggacgctctcctacccagcaaccatgaagattgctgccgcgtcttcggtggtgtgcttgagccccgctacattgtcggcgcggaaccactagaccagtgagctgttacgcactctttcaaggatggctgcttctgagccaacctcctggctgtctatgcgactccacatcctttcccacttagcacacgcttcgggaccttagacgacggtctgggctgtctccctctcgacgacggagcttatcccccgccgactcactgccggaatacacgtcaacggtattcggagttcggctgctgttggtacccaacaagggcccgcaagcatccggtagctctacccccgcgacgcaatcgaccgacgctgcacctaaatgcatttcggagagaaccagctatcacggaatttgattggcctttcacccctagccccaggtcatccccccggttttcaacccaggtgggttcggtcctccacgcggtcttacccgcgcttcaacctgcccagggctagatcatcccgcttcgggtccaggacaagcgactaaaaaacgccttttaagactcgctttcgctacgcatacgccacacggcttatgctcgccacccgccactgactcgcagactcatttttcgataggcacgccgtcaccccacaaggaggctccgacggtttgtgggcgcacggtttcaggaactgtttcactcccctcccggggtgcttttcacctttccctcacggtactggtacgctatcggtcagacaggtatgcttagacttacccaacggtctgggctgattcacgcgggattccacgaggcccgcgctacttgggacaacacgatcggaagacggctcacgtccaggtacggggctggcaccctctacggccaggccttcaagcctgttcccctggcaagccgttttatgactcccgcccggcccgtcggaaccgggacacgtgatcccacaacaccggcaacgcaacccccgacgggtatcacgcgcaaccggtttggtctgatccgctttcgctcgccactactcacggagtatcccttcctgcaggtactgagatgtttcacttccctgcgtaccccccgcccataggcggtgccggcccatgacggccggcgggttcccccattcggagaccctaggatcaaagccatgttggaggctcccctaggattatcgcatcctcaaacgtccttcatcggtactgtctgccaaggcatccaccatacgccctcgcaagcggcacaacagcaaaacaaattgtcattgccccacccgcgggtttcctgatagcaagatcgccagacgacaaatcttaacactaaaatgatcacaaaacgatcgatctcgaaaccaaactcaattgaagagtttggcgaaatcgcgataagcaaaaagaaacgttctttcagtttctcttgctcgcgtccactatccagttctcaaaccaccacgcgccacacgatccgaccagccacccaggaccggccaccacgcatgggcatcgaaccgcgccacagaaacaaacgctgtggggtggcggtccgggagcccaaaagcatacccataccactcccggacgggatcccgacgggacatccaagcccatgatctcttccacaccagcatccacactataaggcatgactgtcacgccatcgtgtggcacacactgtccaaaaaacattggactgaattctccgtagaaaggaggtgatccagccgcaccttccggtacggctaccttgttacgacttagtcccaatcacgagtctcaccttagacggctccccccaaaaaggttgggccaccggcttcgggtgctacccactttcatgacttgacgggcggtgtgtacaaggcccgggaacgcattcaccgcggcgttgctgatccgcgattactagcgactccgccttcatggagtcgggttgcagactccaatccgaactgagaccggttttaagggatccgctccccctcacgaggtcgcatcccgttgtaccggccattgtagcatgcgtgaagccctggacgtaaggggcatgatgatctgacgtcatccccaccttcctccgagttgaccccggcggtcccccgtgagttcccaccacgacgtgctggcaacacagggcgagggttgcgctcgttgcgggacttaacccaacatctcacgacacgagctgacgacgaccatgcaccacctgtgaacccgccccgaagggagaccgtatctctacggctgtcgggaacatgtcaagcccaggtaaggttcttcgcgttgcatcgaattaatccgcatgctccgccgcttgtgcgggcccccgtcaatttctttgagttttagccttgcggccgtactccccaggcgggatgcttaacgcgttggctccgacacggagaccgtggaatggtccccacatccagcatccaccgtttacggcgtggactaccagggtatctaatcctgttcgctccccacgctttcgctcctcagcgtcagtgacggcccagagacctgccttcgccattggtgttcttcccgatatctacacattccaccgttacaccgggaattccagtctcccctaccgcactcaagcccgcccgtacccggcgcggatccaccgttaagcgatggactttcacaccggacgcgacgaaccgcctacgagccctttacgcccaataattccggataacgcttgcaccctacgtattaccgcggctgctggcacgtagttagccggtgcttattcgaaaggtacactcaccccgaagggcttgctcccagtcaaaagcggtttacaacccgaaggccgtcatcccgcacgcggcgtcgctgcatcaggcttgcgcccattgtgcaatattccccactgctgcctcccgtaggagtctgggccgtatctcagtcccaatgtggccggtcgccctctcaggccggctacccgtcgaagccatggtgggccgttaccccgccatcaagctgataggacgcgaccccatcccataccgatgaatctttcccgacacgacatgcgtcatgtcggagcatccggcattaccacccgtttccaggagctattccggtgtatggggcaggtcggtcacgcattactcacccgttcgccactctcacccaggagcaagctcctgggatcccgttcgacttgcatgtgttaagcacgccgccagcgttcatcctgagccagaatcgaaccctccacaaaaaacccttttcgtgaagagacatcgacacgatgactctcgaaataagaaaattgacgatcgccttataaggaaaggcgcatcgcacaaaaacctcgccgccgtttgaccgatccctcggcaccacgcgtcagcgtggccggcaacgaactggcaatcattgactataaagaagtagtacaaatacgctcttgagttctcaaaccaccaccactcacccacctcgcggaccggaaccatccggaccactcgctgagcggcagcaaaagataaacttacagcacgatcgcgatccgcgcaacccgggccgcatgaacaacgcgtggaccgttggaaatccaacgttccatcggcgtgtcgaaacttgacaaatcagagcctcttgttctcccaatcgcctatttcgacgccacgcagccacgcaacacacgtgatcactggcagttgaactggtacaacgcccagcccttcgcatatgaagccatattcgaataatcctgaaccttgagcatcgtgccgtctttggcgtactggtcgatcagcttctgatcgtggaacgtatcgtactgctgcttgaacgtgaacatctgcaggctcggcgcctggccgcccatgctcaggaagtatgcatcgccatccgcgctcagcgggcagacggtattcgtcagcgccctgccgtcgcccgacgcgaacgcattctccgtctgtccgaaaatcgcaccattcttctcggccttcgcgttgtaaatcgggaacagcatatccgcgccgtacatcgccgtcgcatacatggaaccgttcagcggatcggaaaccaccaccgaatcggtaccagtctccttcaccaccttcttgagaatcttctccttcgtggcagtgagctgctcgtccggccgcgcatcgtcaatcgtcatattcgcatagacggcatccgacagggcggaacgaacagtattgccgaattggcaggaaatggcgagcgccgcaagcagaacaatcgcaatgattttcgtgacgttcggcagacggccggcacgcaacaatacgacggcggcgaagacgatcagcggcagcacgccgaacggaatcatggtaagcggtcgggtttcggcgcgataccaggcggcggccacgatgttggggaaccagccagtcagcgcggtcgagcagacgtagacgagaccgaccaggaagaaggccagcagaatggcgatcgcgtcgcggcggagttgcgaggcgtcggaacgtggagtgcggtagctggcggaagtcttgcgattcctacgatcggcaggcatagccgcaaaatcggcaacctgttcgtgcggttgcgctgacgtgctatcggatgcacggtcaatcgcagaagcgccgggcacagtagcggaatcggcgcgattggcggcgaaccattgcgggcggatgatggctgcgacggtgacggcaaacgcgatcagcacgattgcggccatgaaccagccttgcacgccgccgatattgtcggtgacgtagattttgagcgcttcgggcaccgtgcggttcggaacgaaggtgtggaaccagctggcgggattgaagtagcggtccgatttgtagctggacatcatgtacacaaggaacacggcggcgccgagaaccactacgccagcaaggcctgcgatggctttccatggcagtcgcgtcagcacgaagggggccatgagcaggagccaggtgaacacgatgcgcggatgggcgaacatgcagacgccggcagtgacgaagaaccatatgatccatttgacgaggtgttcgcgggtggcgagcgcgtcgagcaggcgaagtgtggcgtacagccagaacggcagaagcgtggcggccaggccgaaggcgatcagcggaccggaagccagcatttggaaggggtgcgaggcggaagcgacggcgagcggggggatgatgagcgcgagtatcgcggggaatagcggaactacgacagacgcgacattgcgggccgaggactttcgtgcgttcgcaaatcggggggagcatacggattgtgccgaatgcgacaggcgacgcgtgaaataggaagcgtacagctgaatcgcaatcggccaaaccaagccggatgtggccagccagaccgtgttgaacgcggcgtaaatcgacagattgacgccgaacaagctggcgagcttaatcatgccggctgcaagcagatggaacaacggcggatagtattcgtcgttcggccacaggtgggtggccgcgccgacgccttcgccgaggatcttgcggatgaagtaatagtgcgcgggcgcgtcgatttcgtgcaatgggttcgtccaagcggcggaaccgtgcggaaaccaggcccatacgaccgcggcggcgagcgcgacgccgatggcggaacagaccggcagtgcgatgcgggataagcggggaacggcggaatcgcaaggcaaaggcgaggtatcgttcgtcgtcttgcttgatatcttgtccgtcgttttagccgtcgtttcgtctgtcgtcttgcttgcggcgactgcgctgtcggcttcatcgactgcgtcgtcggccgctgtgggaatcgtattgtctgtgctgtgctgcttcatcgccatccatcgtagccgaagccgcgaaagcaagccacaaatcgcaatcgcacctgcattttgtaattcaaaactggaccgtgcggcaacaaaagctggaaaggcatctaaaaacggatggaacatgcgcgggatgggcgcaagacggacgcggaacgcgggaagaataggcggacgtagagcggagacgagcgcgagcaggaacaaaatcgccgcttatccaaccttcgattttcaggaagtattcagacttcacacagaggtataacagtgttgcgcaagaaaacaatcacgttggatgggcaggatgattgcacggggcgcattgcgctgtgagcgtactcgctgtcgttgcttgactgtgtgcgtcccggccaacgctggcgtcggcatgcgtcgacgcgtaactacagagaactggagaagtaccgcatgttcgttctcaagaacgcatgggctgcgctcggtcgcgtcaaatggcgtaccgcgctgacggctttgctcgcactgctggtgtcgttctcagccgccgtggatctggcggtgctgagagccgacgacaaggcgaataacgaaacataccaatcgcagaaagcttcggcggtaattcggccaagcgcgaaagtcactgcgaaacgcgacggcgcggactccaattacaccgccaattacatgacgtgggacatgtacaccaagtacgcggaagcggtgcagaagaacaacttgacgttcgaatacacgctcgccacgtcggtgccggtgcgcgccagcaagtcgctgcaggcgatcgcggcgaaaagcgacacgagcgaggacaataccggcggcaacctgacgttgcaagccttctacacgaacgatgcggcgaaaatcaacgactacggcacgttcaaagtggtcaagggcaagcagctgaactacaagacggccaacgacggcgtgctggtctctcaggcagtggccaagaagaacaatctcaaagtgggcgacaaggtgaccggcggcaatccgacgaaggcttccgaaacctacaaattcaccgtgcgcggcatctacgagtacaccggcgaggcgccggccggatacggttccgacgcgaaatacgcgaaagacaaccgcgagaacgtggtgtacacgtcgtacatcaacttcgcgcaaagcggtctggatgtggccggcaccaagggctgggccatcccgaacctcaacatcatcttcacgctgaccgatccggccacatacaacaagttcgtgcgactggtgacaaaggccaagctggacacgtcgaagttcacaatctcatcgccgtcgcttgatgcgtacaagaagcgcatcgcaccgctggacgccgctgccaaggccgcgcgcacggcgttgttggcgaccctgatcgtcggcgggctcgcgctgctggcattggtgctgtgggccgcgatcggtggacgccgtgacgaaatcggcatggcgatggtttccggcgtcaccaagggacgtttgggatggcaattcatgctggaaacgttcatgatgaccgttccaggctgggcaatcggattgattgccggcgcgctgctggccaagccgcttggcaccgcatgggccggtggacaggctgtggccatcacatccgcatccgtgtggaacatgatctggtacggactgggcgcctgcctggttctgggcatcatcgcgttcatgcgcgtgggattcttcgatttgggtcagctgttcgcaggccgttctgacgattcgaacgaatctgccgaagcgaagaacgcagacgagccggaggaaacagtcgagtcgacggaacgtacggaggtgaacgcatgagcgagaaagacgtgaaagacaacgaaaccgaagcattgaacaacgctgccgctgaaaacgcggaaaacgcggacatcgaggcgggcgaaaccgatatggccacgtcgatcgaatcggtcgatttcgcggtggtgtatgacgatggaggcgattccatcgcaaccgaatcggcagaaaacgcggaaaatacggaaggcatcgccacggaagacagcgttgccagcgacaacgcgaatcgcgtgaacgaaacgctcgcattgggcgcgaccgacgacgaacagtcgctcgaccagcacgaaaccgtacaggcggactccgcaaccagcgtgtcatcgcagatcgaccgcgaaatcaaacatcatcgcaagaaggacgcattcttcttcaaggcgaacccgacattcgcgctcgaccatgtgacggtgcacaaccgcaaaaccggtcgcaacgtgctcgacgacgtttccctggcgttccatgccggcgcgacccacgcggtgctggtggatgccgaagatgtcgaacagcatcaggcgctggtggccaccatggtcggcatgatgcggacgaccagcggcaacgtgatgcacaaaagcacgaacctcgccgacgcgacaccggtcgacgtgcttggacaccgcatcggtttcattccgcagcggttcgccgtgcgcggcgaccttgacgcggaaggcaacgtgctgtacgccatggacgcgtcgaaccgcaatttcctgcagcccaagccggtgattgcgcgcgagctgctcaagcgcgtgggattcgaggaagtgacttccggtctgccggtgggcaagatgagtgcgttggaccagcgtcgtgtggcaatcgcgcgtgcgctgagctgcgaggcggaggtgattattgccgacgagccgaccgctggattgaaccgtgacgacgccgccgtggtgctggggctgctgaagaaggccaagcgcgatgaggatcgtaagcgtgcgattattgtggtgaccgataatccggaggtcgccgatcagatggagcattgcgcggagcttgagtagcgagcggcgttctgcgaggcgaaagccttgcggactggtgttgcatgccagtccgcaaggcttttttcgtgctggttctggttcgtgccgattcgcgctggttcgcggtgacacaccgctaaaaacatgtcatatgcgctacgtgtggcagattctttcatctttggaatctcaaaaccgctatgtgtggcaggttgtttgacgcatcgtgagttagaggggcggttttatgccccctaatgtatggcgggaaaagagaagtgccacagatagcggctttcagtgcgcaaaactcgggcggcggccaggcttcgaggaattttcgggtgtatctcgcttatgaatggcggatttttccgctcgacgcgtgctatctcgcttatagatggcggatggttttgccgcatgagacttagaggggattgaacttgccccctaacacctagtctttctgagacacccgccattcataagcgagatagcatccggcagacaccgaaatccgccattcataagcgagataagtaggttcgctactcggcgatgcgcatgtggtactgctcggcgagcggtttgacgtcgaggacgccgtagcgttccagaaggcgcagccattcgcgcttgttgctttcgccgaaacgggcggccttgcgcgtgtaggcttcggcggtcaggaacttcggcggaatcgacttgctgttgtacttgtccgccaccatgacgacctcctgctcgaggttcatcggcacgtagtcggccgggggcaacggcaatccctgcgattccacggtttcgcgggtgaggcccacacctgtgtggttgcgtgcgaactgggcgatcgattcgtcaacgccctcgttcagcaagtattcgtagcctttgagcccgtgctgaacatagtgcggaccgtcgaatttgagcggttcgccgtcggaaccgtcctgcttgagcaggaaatacgtgccgatgtcgtgcagcaaaccgccaatgaccaccagatgctcgtcgatgagccgcggcggaacggtacctccggtcagcccttccgtggacggcaccgcaggcatgtgcaacatgccgagcaattcctcgccggtattgtctttcgtcagttccagcccgaagtcgccggtcttttcgggagcgtccgtcggcagggtgcagcggcgggtgaacagcgcgttctgccggcgggccatgcggcgggcgatgtcggccacgaccacgcagtgaccatggatgaggtcgtatgcggcttgcgactgggcgattttgcgatgtagctcgtccacttgcgcaagagtggggatatagccggtcgtcggcttgttcgattcggttgtttcgttcgattcgttcgtcatacgcccatcttaggcacgttccatcacgcccagcatacggttcttgacgcagtttccaaaacggttcccaacagccgaagggattcatacaccacgccagataaatcccggaacggacacggattcaacggtttctccgtcttgtcaacgatgttccaaggaatgccgccttaaaacgagcatttatcagctgcccgcagcggacggcacgatacgcggggacgttatgtgcggaaaatcagatggaacggacgcggaattcgccggtgcggttggaagccacaatcatctggtcgttttcgagacgggtccagccgtcttcggcgcgctggtcgaagccggagctggccacgaccacgcccttcggctgggcatcgtcgtttccaccgagcgcacggtagcgcagcacgcggtagtcgcgcgcctgctcgccacgaccgtactggtcgtagatttcgacgatgcgcttggacgtgacctcacggccggccgcgcacagggcgatgaactggtcctggctttggatcatgcagttgtagctggacttcggatagcttttgcgcagttcgcgcacggcctgcgccaccgcctcgtcgagtgcgaagccaaagccgatgtattgcaggatgacggcgaagaaaatggcggaatcggaacggccgccggtggactgcacgatgctcggatcgaccgggaacgcgcgattcgtaatgatgttgcggccctggtcgtcagaaatgtcgccattgtggatgaagctcaggccgttcgcatagaagggctgctggttttcaagaatcagcggcaggttggagctggccaggcgcagatgccacaggccgccgcgggccggagtgttggcgagctcgtcgaaaatcggatcatgacgggcggcgatggtgtttttgtagatcgcggtgccggtttccggagtcggcgcaccgccgtcgcgacggtatggcgattcgtccggcacggtgatcagcgcggcgccccagccgtcgttgtggatctcgctcagatttcggaaatcgcgcacgttctgcatgccgagcacgccattgaggttggtgttgctgcctgccgtcgcgaatccaagtaatctgcacatggttgattactttagcgacggcaggtttcgacgcgcgcgtgccgttatcggagttggttatagcctgcgattcagccgccgattcatacgcatcgcacgtcgcaaaacgcacgtcacgaacgtaagttgtcccgcaaacgagcaggaggaccgacatatcctgttgcagaccgtaaaaactcggcctgagcggcccggagcgtgtcggtaataggatatgccggtcctcctgcggacttggcggtattcagccaaaggacaagggctggggcatctcgttcgtgacacactcaaggccgttcggccaagcctacggtcacaaacgaaatgtcccagccctccttgcgtagataagccgtgctcgcagagcggattcacacgcgcttcagacgcggcggacgctcggtggcgaggaacagcggctgaatctcaatcagcggattgtagggagcgagtccgaaccatttgaccggagagccggccaaatgacgaatcgcgtacttgatctgcagtgagatcgcgcccttctgggacaccttcgactcgggcatcaacgccttgtgaatcagcacgtagcggataggtccgatgttcggatcggcatccagcttcgggtagcgggtggtctgcttgggcagatcgccggacttcgacagatcgttcatgatctggtggatgtatgcaggaatcgactgcgacaccttgaagcccaagcgaatacgcacgcggaacaggaagtccgtgccgaaattctccaccgaatactcgcgcgtgaacgggttgtcggatgtttccaccgacaccgcccaccatgcgcgggcgcgcttcggatggtccgcgaaaatcgagaagaagatgtcggtatcgacacgcttcatttccggatcggacgtcagatagacgatgttgtccgtgaaatacggaatcgaatcgtcctcatgaagctgcttcagaaccggcacgcaatcggcgggctgcatatgccggcgttgcgcgcgttccagcttcgtgccttcgttccacgtgtacataatcagcagaatcgccaatgtcagcagcatggtgaaccagccaccgtgcaggaacttcgccatcgaagcgaagaagaacaggaactggatggccaggaacaccactgtgaacacgaccgcgccgacgcgcttgccatcgtgccagatatacaccgccagcagaatcgtggtggtgatcatcgtgacggtcaatgccaggccgtacgcggcggaaatatgctccgaatcgcggaacatcgccaaaaccagcagggtggagacgcacagcacagcgttgaccaccggaatgtacagctggccgcgggtacgagccggatagcgcacctgcaggtggggcatccagttgagtcgcgtcgcttcggaaaccatggtgtaggcgccggtgatcaacgcctgcgaagcgatcacgccggcgcacacggacagcagcaccgccacgtagcgtacggacggggtcatcatttcgaagaacggattgaggccgtgcatgtggttgtacgcggtgtcgtcccaatggttgagcatccacgcgccctggccgaaatagcagagcacaagggcgattttgatgaacggccacgtgaagtagatgttgccgcggccgacgtggcccatgtcggaatacagcgcttcggcgccggtggtggacaggaacacggtgcccatgacggcgaggcctgccgcattgtggtggctgaagaggaactccacgccgtacaccggattcagcgcttcaagcacgctccaatcggagctcaggttcaccaagccgacgacggcgaggaacgagaaccagatcatgaccaccgtgccgaacgtgcggccgatgcgttcggtaccgcgcgactgcactgcgaacaggcagacgatgatcacaatggtgatcatcagcgtcagttctttgttttcgctcatgattggttccagcagcggcagtgtttccaagccttccactgccgagctgatcgagacggccggcgtaagcacggaatcggcgaggaacgcggcgccgcccagcatggcgggaatcgaaagccatgccccatatttgcggatcagcgaatacagtgcgaagatgccgccttcgccgttgttgtcgatgcgcatggcgatgaacacgtatttgacggtggtgatcagcgtgatcgaccagaagaccagcgacaggatgcccagcaccgcggcgcgatccgtatgcgccaaaccgccttggccgttgaggaacgtctgcatggtgtacagcggcgaggtaccgatgtcgccgtataccacgccaagcgccacgatggccatggccggcgtgattttgtccgggccggactggagacggctccaccagcggccgatgcggcccttgctggcggcctcgtcaagtttcgcggcttcctgctgctgcgcctcgtgctccttgatgagcgtctggcgctcctccttggtcaggaccttgtgcgagacctttggcgcctgcgtgtacgtcgctgcgtgaagcagcggctgttcttcttcgttcggctcgttagccataacgcttcctccaagtggcgggccttccaacccgctccccaaaataaaacgcaaggtgtgacactaggagcttggcaaaccattgtcaaaccttcacacgtgattcggcacgtcacgcatgaaattcacatatgcttaatcgtttgtattttgcttattttctggcgattacgcaactgttacgttgaggcccatgcgaccgtcacggaaccgccacgggattaccgcgaaatcgccattctttttagatgccgtacacttcgcgcgtcgtttcacgcgtggctttggcgatttcagccaacggtctgtcaagatagtcggcgagcgcctgcagggtgtacgggatcatatacggcgcgttggtgcggccgcggtagggcatcggacttaagtagggggcatcggtttcgaccatgacgtggctcatgccgacgagtttcgccgattcgcggattccgtcgttgcctttgtagctggatgtgccggaaaggctgagataccaaccgttttcgcgggcgatttcgcccatttcggcgtcgccggagtagctgtggaacacggtacgttcgggggcgccgtcggcgagcaacgtttcgatgacttccttgtgcgagtcgcggtcgtggatttgcatgggcaggttgagttccttggcgagcgcgatgtgggcacggaacgcttcgcgttgcagttccttggcggattcgccagtgcggaacaggtccatgccggtttcgccgatggcgacgacctggttggggtaggtggtggcgaggcggtgcacttcggccatggcttcgtcgaaggggatgtcgtgccaaggcttgtatttgatgggcaggccgtcggggccgggcgcgccgcggtggccgtgcagcacggcttcgttggggtgtatggcgattgcggcgtgcacggttccgggatgctcgcgggccatgtcgatggcggtcatgaggttgggcagctcgcaaccgcagtcgattacgccttcgacgccgactttctgggcttgttccagcagttcgtcgacgctgtagacgggtacttcgccttggcctttttccatggcttcgtgactcatggcttgggagaagggcacgacggatgcgacgtgggtgtggttgtcgatgacgtgcgcgtcttcgggcagcggctgtggggccggggcccaattgcgattgcggtggtgcttgctcatgttttccagattagtcccgattggccctgcactgcggacgaactctcgttcgagggttcaaacgagggtccgcccgtttcgcggcatacacgtcacttaatcgtgatggtggtgaacgaccatgccggtgccgtgtagtcgccgtctgtcagatcaatcgcggtctgccgcggcctggtcggcgattcctcaccgacctgtcccgcatacggattgtctccggctaggacggtggccgtggcggatgccgccgatgctgtggaaatattcaactcggcaagaatctgacgtaggtcgacgcttattggcgcgtccatggcattgaccacgcgcacgtaggtttcccctgccttggcgttgcgcgatacggtgacggtgcgccttggctcgtccttgacctccgtaccgtctgcgatcagcgttccatcgatgtacagcttcatggcttggccgcggtcggtgatgtcggcgtgcacctgccacgtggtgcccggccgcacttcattcatggagacttcggtgccggcgagcgcataggcggtgccgtcgcggacgacgcgcacgctgtgcccgcgaccgagcgagacgatgttgtggttcttgccgtcgatatcgccacagatgaggtccatgccccatcgtccctcgtaatagacgacggtagtgtcgatactgtaggaatcagcgtgcagatcgagggcggtgtcgatggttctgccatcgtaggccacgttgccgagattaatcgtctccccggatgcggtggtgatgacaagattgttgaggtcggctttggcgttgcccgcgatgcgtagtctcacggtgtccggcagggtgcggcgcagcgtggacgggccttcgacggtgacgggccacgcagtgtcggccgtggtggtggcgtacatctgctgcacccaatagctgtagggatggtaggcgcgttcgttgtcgaagtagatgaggtccggattccagctatggtgcccattcttggcgaacagcggggcgtaggaggccatggccaccacatcgccgttgagttccatgcgtcccatgaaggccgcttcggacaggccgttgatcagttgggtgttccaggagccgtattcgccgaggtagaccttcggtcccttgcggtccgtgtggtcgtagtggtcgaggttgtggaaccaccagctggacgactggtaggaatgttcgtcgacgatcggcagacccgcttcgcgcgcgtacttccagccttcctcataatcctgaccgctaggagcgggaccgacggtgccgacgacgacgatgtccggatatgcggctttgacggcgtcgaaaatctgctggaagcggttcttgaacacgtcgtcgataagatcctcgttgccgatgccgaggtattcgaggccgaacggctccggatggcccatggcggcacgcttggcaccccattcggtggcggtgctgccgttgcagaattcgatgaggtggagcacttcatcgatgtaagcgggcatatcctcctgcgccaccggcaccgggccttggctggtgttttggcagctcacgccggcgggcagcaccggcagcggcttggcgccgatagtttcgcacaggcacaggtattcgtagtagccgatgcggaatgactggtggtagccccagaggttgaagttgtgcggacgatgctcgaccggtccaatggtgcggtcccagtggtacatgttgtccatgccgaggccgtgggtgatgcagccgccggggaatcgcatgaatcgtggtttgaggtcggcgagcgcctccaccaaatccgggcggaagtgcttgaggccgcggtaggtggtgcgtggctccaaggtgacgaagtcgaggtcgatgacgccttcgccgtcgaaggtcaggcgcaatgtgccctgtgtggccacgctcgagccggcatcgccgtgctcaggaacggtcagcgaggcttggtatgtcgtccatgccgaggctgagacggtgatggtggtttcggcgatgatgctgccgtcgtctccgcgcagcgagaccgtcaccggcatcgcgctttccgatcgcacgcgcatccaggcggtgaaatcgtaggtttctccggcgcggaacaccatgccgtcccagccggtgttgtccagcgcggcaggggcgtgttcgacttccaccgtcgcgtaatgcgggttttcggtggcgaccgggtcgttgtcatggatgcagaacgcggcgaacgagccttccggcacgattttgcgccagaagctgtagttgctccaatcgatggagtcggcgcggttgtattcgaaggcgccgttctgcacgaggtcggcgttgaggccgccgtcgccggagtagctaatgtcttcgaagaagatgccccacaggtcggtgctgatggcgcgcacgcccgctttgtcgagtgtggcggtgagtttgtcggtcatggtgtggccgtcagccggatattcgtcagccggggcgacggaaacggtggttgggatcgtcatcgaacctctcttttcgttcgggatcgctatgggggctgtgtcgcggaaagcaggacgccgtcatgcgaaccgtatatgtatcgttacacatactagcgcaaatccaatcatccgcaatggaggcaatatatcggtgagtctttgtatttgcaacgattttacagaatcaagagaatataatatcgttacatatcaatcataagttttcaaggagcggcatatgaccagcagcacaccgacgctacgcgacgtggccgcggaagcgggcgtctcccccatgaccgcgtcgaacgcgctgcgcggcaagccaggcgtcaaggaatcgacccgcgccaaagtgatcgccgcagcgaagaaactcaattaccgcatcaatctgacggccagcatgctcaaatcgggccgcagcaacatcatccacgtcatcgtcaacgaattcgattcgccgttctattcaaagctcacgcaggcgttgagcaacgaaatcgtgtcccgcggacttattccattcatcgagcagacgcagtattcgccggacgccgccgagcacgcgctgagcagcaatccgttctccgggcagctgttcgatggcgagatcctgcacgccacaggcttgggcacaaatgtgccgctgtccaaactcaatggcggcagaccattcgtgctgctggacgcctgcgaggagacgccgaccgtcgatgccgtgaacttccccaacgaggaggccgaacgcgcggcgacgcagcatctcatcgaccgcggatgccgcaatatcgcgatcgtcggccaccggttcgccccccgcgccgatctggcgcatgcccagaacgcgttcgctctgcgattgcgcggcgcatgcggagcgctgtccgacgccggactgccctatgacgagtcgatggtgttcgaagccggggatgtggccaatggcatcatcgccgggcatgcgattgcggaacgtattctcgccgcacggagcggacatggtggcaccgagttcgacggcgcgtgctgcgccaacgatttcgcggcgttcggcgtgatacgcgggctcgcggaccgcggactgcgcgtgccgcaggacgtgaaggtgatcggtttcgacggcgtgacctccggctcgtacacgacgccggcgttgagcaccatccaggtcgatttcacgcagcttgcgaaattctcggtcgatatgctgtccgaacgtatcgatcatggaacagacgaggcgttgccgccaagacgggccatcatcggctaccagctggtggaccgggaatcgaccgcggtctgaggatgacgccccgatggcaggcaatccgccataggcagcagccttcgcggccaatcccactcaatcggaatcactcaatcggaatcaatcgccatcattcatcaaggaatctctaggagcatcatgagcatcgacacccaggcctatctgttcgtgcatttcatcggcgaggaacgcaatcccaccgacgaacagctgtacttcgcgctgagccgcgacggcgtgcattggagggatctgcgcccggccggcagtccggcgttgacgtggctaggcggcgagaagggcgtgcgcgacccgcatattgtgcgcgacccacgtggtggattccacattgtggccaccgatttgagcatctattaccgtggcggctgggggccgaacgatggcgccaccacgaatggatcgaccggcctggtgatctgggactcccctgacctggtccattggagcgagccgcgcctggtggacgtggcctcgaagattccggacgctggcatggcttgggctccggaggcgaattgggatccggatcgcgggcagtggatcgtgttctggtccacgaagagcaacgccgaaagctccgcggatccgttggccaacgagctcggcgatccgacgaatgtgtattatgcgacgaccgttgatttcagggtgttctccgatccggtcaagtggatcgatcgtaagaatgtgatcatcgattcgaccatgctgcgcgacgatgacggctggtggtaccgcgcgtccaaggactcggaaatcaccatcgaacgcacccgtaacccgtatgcgacgacctacgaggtgctgcgcaccgacgacccgaatgagtggtcgtatgtgggcacgctcaccgacatcttcggcaatggccggtattccatgcactacttggaagggccggaactgttccgttacaacgacgaagacgtgaaggtggtcaacggcaggaccatgccattcggcctgatgtgcgaccagtacgcggagtccaagggctacctgtcgttccgcgccgcctcgctcgcctcgcatgatccggccgattggcagcgcgcagacgatatcgatttcggcgcgctgaagaagcgtcacggcgcgattctgccgatcacggccgccgaatacgacgccatcgaaaccgctttcgccctgtaggcggcgcgattgtccatccgtcgcaaccgctcaggcgcggcggatggcgaagatgcgggcggacggctgcttggaggtggtcgcgttgagccggaccgtctcggggtccatgcgctcgacggtccacggcttggcgtcgggcgcatgctcgggaacggccggattcgggaagatctgctcgatatggcagtcctcggacagcggcacgttcacggaaggcgtgccgccacgtcgccagacgatgatgtaatcgcacggatcgtcgtcctccgacgggaggaatgacggatggcgcagaccgacgacgagccaatcgccatcgaaatcaggcagacgggccggccagaacggcaccaattcctgctgctcggtcagcacacggcggtgcaaggccaccgcatcccgcaccaaggcaagccgatgctcgtccatgcggtcaatgaatccggacaggtacaacctgccgagtatgcccgtggccagcgtgaagacggcggtctcatcgtccatctcctgctgggcgtaaccccagttgccttgctgttccggcaggatcgtcagtccggcgccggcggcgatcgcggcgtaaatcagcggatcacactggtcggaggtggattgcaggtccaatcgttgcaactgcgcgtaatcggcgcgcatcgcaccggaaccgcagttttcgatcataacgtccggatggcggcggcgcaggtcgtccagccaatccaaataggcacggcagtggccgagcaggccagcgccggcggattcggcgtcgagatcagtgccgacgccggggacggtgttgtagtcgaatttgaagaagaccgcgccgaaatcgtcaatcagccggtcgacggtgcgagtgacgtgctcgcgtgcggcgggcgagcggaagtcaagcaggtaccggcccgaatcgcagacgcgcacaccgtggcgctggaagaacgcgtcatcgggcagactttgggcgagcggcgatttcacaccgatcacctcaggctcgagccacaatcccaagcccatgccatgcgcgcggatggtgtcggccaaacccttgagtccagcttcgccgaaacggttcgtggaggcctgccattctccgaccatgtcccaccaaccgccgtccgtgctgtcgtaccagccggcgtcgatgcagaagatgtccgcgccgacgcgtgccgcgccctcgacgagcggcagctccttctccaagcgcgggtcgccgaacagggtgttcatgtaatcgttgtagatgacgagtccctgcgtgcgttcgaactgctcggaacgacccaattcgcgagccttggcggcacgcaacgcacggcgctgcaatgtcatttcggcgacggactgctgccaatcgccggccgagatcgcgaaggagaccggcaccgattcgaaatcgtggccttcacccagctccgtataccaatggtggtcctgatattccggtccgaacgcgctgatgtgcaaaccgggatcatcctcgccgatctcccattcccatgggccgttgtgctcaatctgccacattacggagaagtcgcgcgattggcggcgcgagccctcgacctgtacgatgccggccggctcatgcacgccggtgctccatgtggaggcggagctcatggcgaatcgcgagctggattggccgggattgatgacttgattgcgattgcgcaccgatacgtcgcgcagtggacggctgcgccaatcgttttccaccgcccacgcggagtctccccagaatacgcgggaatggtcgattttgccgcagttgacgcgcatcggcaccgtcagattcaacgacgacaccgcctcgataggcagcgggcgcgcggagctcaaccgcgcgtaggtgcgcactgcggacagacccgggaacgcttcgaatacggaagtgactaccagcccagccgtggcgtcggcatggcggacggtttccggcgagggctgcgcggcggcttcggcccgttcggcggcggtcggttcgaacgcgcgcccgtgcggctccagttccgcatacgaagcgaattggacgatctccaaacgatatggttcggcggacccttcctccggctcggaggcggcggccgagacgaatcgcaatacgctgcccgccaccgtggcgatcaaggtgaggcgattgtcctgcgatccggtgttggcggcacgcacttcgacgatcggacgcggatcacgttccagcacggttcttccatcgtcggcaacacggccgccgatgggccccatgccgcggcctgcaacgttgcacaatcggacgggggaatcgcctgccgtgtcgaacagcatggaaaccacgccattgccccattcgagacgcccgtcctcacggggacatacggggttcattgcaccggcaccgcttatcatcttcgactcctcaaccgtgttcagataccgcctgatcattgacatgcatcgattgacgtacctggtactagcttaagcggtaaatggggcaaatcgcacgtgcgtgtctactcgaagcggagatatgcgatgaactcgactggcgcatccttggttttggcgatgttgccgaaaccaaggacagcccctttgtcgggcagtcccttcgtcactcgtcatgctcacccgcgtaggaacaccgtcatctcgttctcgccacggttggcccatgcgaagtatggaatcagcgtggccgtcgtcgtcttgcgttcggcgggacgccaatcatggtacaacgcggaggtttgcgcggagtcttccacttcacgccaagcgggaatcgccagcgtggtcatcggcatatcgacggcgtccacctcgccgagcccctgctcgtcctgcgcgacggcgccggcatggaagacgatgcgatcaacggacacgcaggatggatcggatgcgatgcgcgcggtatcggcgtgcagcagatgcaggttcgcgccattatcgacaccttccgcgcagtaggccagcggtccgcgcacgaacgccacctttccggcgtcctcgcgcacgagcggattcgcggcgaccatgtggaccggcatcgggaaatcgaaatcaacgacgtcgccgtcatgccatgcgccggtcagatacaggtatccgtctctgatgacgcgggagatgtcgtcgcggccgcgcacggtgaccgcatcggaagcggtttcgccaccggcccaagcgggcagacggagggcgatcgtgaaaaccgcgtccttgggggcgtcggaagccgaaccggctgtgccaaagcccaccgtgacggattccttgccggaccagggcatatcggacatgacgtcaaggcgcacatcggtgccggaaagcctggcatggacgccgccgcccatatacagatgcacatacagggtggatgagtcgtctccgatcgtgtaggcgtactgctgcacgtcctccacgatgcgtgcgatgttcggcgggcagcaggcgcatccgaaccacttctggcgcaccggcttgacgtgcgccttgcgttcatcgcgatggcatgcctcgggcaccacttcgagcgggttcacgtagaagaagcttttgccatcgagtgccatgccggcgagcgtggtgttgtacagcgccgattccatgacgtccgcatattcggatttcggctggatttccagcatgcggcgggcgaagaacgcgagcgcgatggcggcgcagctttccgaataggcggtgtcattcggcagatcatagtcgaaggagaaggcctcccccatgtgtgtggcgccgataccgccggtgatgtagagctttcggtcgacgatgttgcgccatagtcgttcgcaggatgccagcaggtcggagtcgccggtcaggcgtgccacgtcggcggctccggcgtagaagtaggcggcgcggacggcgtgtccgagggcctccgtctgttccgtgatcggcttgtcggcctggtagtaggcgtagttctgctcgcgcggcgcgtagttgcggccgtcctcccgggcgcggcggcggtcttcgagctcgaaatagagcggctgctggccgcgttggcgtacaaagtgttcggcgaggtcggcatagcgctgttcgccggtggtctcggcgagtttgacgagtgccatttcggcgatttcgtgcccgggatagccgtgcagctggccgtcggcggtgccgaatcgggaatcgatgtaatcagcgaaacggcaggccgcgtcaagcagcttgcgtttgccggtggcttgatagtaggcgatcgcgccttcggtcaggtggccgaagcagtacagctcatggtggtccttcaggttggtgaagtgccggtccatgccgttgaggatgtagtaggtgtccaggtagccgttgtcgagctgcgccgcgcagacgatatcgatggcggtgtcggcggtcgcttcaaggtcagcgtccgggtggtgggtcagcgagtagccgaccgcttcgatccatttggagaaatcagtgtcttggaacacgaagccgtagaacttgtcggaatcggggtgcgccgggtcgtccggcagggcttcgaagccgcggaacgtgtatttcggcggcacgaaggccttgccttccttgtggtgttctgcgttctgcgcggcggcggccttgaagttgtgcatgcagtagctgggtgcggcgccgggaacgttgtcgttcagcgcgttccactggtagggaatcacctgggtgcgcacgagttcctgccgcgatgcccagaacgggtcggtgacggtggcgtcgcgcaatgcgattggatggctggtgcgattggtggtagtcatgagtgcaagcgctccttagtgcatcgttgtcttgttaacgctcacaatccattattccacgggttgctccaaagtacattccgcatggcggcatgtccgacgggaatcccaccgcggcagccggcccaagctggccgcgcattggctgcgcgaccgttggacaggcatttcggattgcggatatacgggctaaggggcagagcagctagccgccggggctggcggccggctgctcagaccttgatcatggcgtactgcgattcgtagagccggtagtaggcgccatggcgggcgagcagctcggcatggttgccctgctccacgatctgcccgtggtcgatgtagcagatctcatccgcattctcgatcgtggacaggcggtgcgcgatgatgaagctcgtgcgtcccttgagcagatggttcagaccggcctgcagcgcctcctcggtacgcgtgtcgatattcgacgtggcctcgtcgaggatcaggatgcgcgggtcggcgagcagcacgcgcgcgaacgcgatgagctggcgttggcccgcggacagggtcgagccgcgctcctccaccacggtgtcgtagccgtctggcagttccatgatgaattcgtgcgcatgcaccgctttggccgcggccacgatctcctcgtcggtggcgtccagtttgccgtagcggatgttctcacgcacgttgccggagaagatgaacgtgtcctgcagcatgacgcccatctgccggcgcaggctttccaacgtgacggaacgcacgtcgtggccgtcgatcgtcaccgagccttcggcgacgtcgtagaaacgcgacagcaggttgatgatcgtggttttgccggcacccgtaggaccgaccagcgcaatcgtcttgcctggctcgacatgcaggtcgaccaggttcaggatgttgcggccgtccggctcatagcggaagacgacgtcgttgaagtcgacgcggccctcgatctgcggcagatcgacggcgtccggcgcgttgcggatctccggctgcacatccagcgtctcgaagatgcgctcgagatacgcggagcaggtgatcagctggttgtagaagtttccgatgctgattaccgggttccagaagttgttcgcgtagccgacgaacgcgatcagcacacccgtggtcacgtccacaccgccgaaaccggtgacgcccacataatagatgaacgcgatcgtcatgacggaaatcgtctggatgcccggccacataagcgtctggatatgcaccgtacgcatccacgcggaacgcacagcgccctgctgttcctggaatgtgcggaactgcgtgtcctcgcgcgcgaacgtctgggtggtcttcacaccggcgatcgattcgtggatgaacgcgttgagattgctctgcttattggatagcacctggtacgcgcgacgctggaaatgctgcaatcccagcacccacgcgatgagcagcgggaacaacgcgagactgtacagcgcgagacgccaatccacgacgaacatgaccactagcgtgatgaagaacgtgaacacgtcggaaatcacgttgaccagaccggagctcagggtgtccgaaagcgtgttcacatagttgaccacgcggatgaggattttgccatgcggacgcgagtcgaaatagctgaacggcaacgtctgaatgtgcgtaaacaggtcgcggcgcatgtctttaagcatgagctggccgacgcgcgtgatttccacagtacggtagcgcaaaccgaattcgtaaatgacgatgagcaccgccagcagtgccaccagctcgccaagcagtgcaaggtttttcgccggaatgacactgtcgatcatgattttcgtcagatacggttccacgacgttgatgcagcccattgccgccacgacgatgaggatccagaccacgcgggccatgtacggtttcaggtagacgccgacgcgcgcgaggtcgcgcatattgatcttctcttcaaggtcttcatcgtcacggaaggtgttgcgttgtgccatgatgttatcctcccccgcgtcttacgcttcgaatccctgcgagcggccggcatccacgcccaactgcttgctgtaaatctgccaatatcggccgtgcgaggccaccaattcgtcgtgcgtgccacgttccacaatgcgcccatgctccagcacgagaatcaagtcggaatccttgaccgacgaaatgcggtgggcgattgtgacaatcgtcttcttctcgtccaaatcgcgcaagtgccgctgaatctctgcttccgtttccatatcgacggcgctggtcgtatcgtccataatcagaatcgacggattgtcggcgagagcacgcgccaagctcagtcgctgcttctgtccgccggacaggccgacgccacgttcgccgacgacggtatcgtagccgtccggcatgctgctgatgaagccatccgcgccggcaatggcggccatgcggcgcacgtactgttcgtcgtaaccacgtcgtctgcgctggccgtcgtactgaccgttgtactcaagtcggttgcctcggtcgcccgcgccaaagctgatgttgctgccgatcgtatcggaaaacaggaacgtatcctgcgcgacgatgcagacttgcgatcgcaacgtggcgagcggccagtcgcgcgcgtcgatgccgtcgatgagcacacgaccggcggttgggtcgtagaaacgggagataaggttgacgagagtcgatttgccggagccggtttcgccgaggattccgagtttcgcgcctgcgggaacgtggaagtcgatgtcgctgagcacaggcgtccccagatcgtcggggaaagcgaagtcgacgtgctggaagtcgatggttcctgcgattctagccgatttatcggcggcttgcgccccttgcgtaccttgcgtaccgactcgcgtagtgctttgcgtggctttccccgcaaactccggcttttcgcgaatacgcgattcggcggtgagcagcttacggatttttatgcatgccgcgttgaaacgttgccagtcgttggtaagccatccggattggcggattgggctgtcaagcatccacaggtatgagttgaacgccacaaggttgccaagagtcatgtaccctttgatgacgagaaagccgccgaaaccgagtgtgataagttgcagcgaaaagccgagaccgtcaagccagggcatgtatttgcggctgttgtatgcctgggccatgttgcgttgcatatagtcgtcgttgcgtccgtcaaatttttcggtttcgtacgattcgcgcacaaacgctttgacgacgcggttgccttcgatgttttcctcgaccatcgaattcatttcggcgagcgagtttcggatatcgaagaacaggggtcgtgcatgcttcgacagaccgcgtgtcaaaatgaacagtggtggcgtgacgcaagcgagcgcaagagcaagtcgccaatcaatcgaaaacatcatggcgagcgcgccgatgaacatgaccacgcagtcaagcgcttgcaggctcacccagctcagtgcgtggcggatggcgtcggtgtcggacgtcatgcggctcatgatgtcgccagtgcgagtgtggttgaagtaggtgaagtcaagttcgtggagtttttcgaattcgtcgctgacgagacgatagatggagttctgtccgaagcgttccatccacatttggcagccgtaacgggagccgacacgcaccacggtgagcacgagcatcatgacgcacagtcgggtcagttcgtccacatggccttgggtgatgacgcggtccacgatcagtccggacagcagcgggatggtgagggccatggtgttgttcacgcagaacagtacgaccgcgccggccacgcgcggcaggtcgggtttgcagtacggcaggatccatgcaaggttgcccgcctgctggttgcgtttcggatcgacatacatacgtagcgttccttcgaattgtttgcttgggtcttggttgggttgttgttgggttgtggtgttgcggccattcgttgccgccacgattcacgtccgtcgtgtgtcgagcgtcccgtcaccggcatgccgccgccggccgaaacccctgttcggattcgcaaactcgacttattttaaacgaaccgtacgccgatgcaacagatgcgttttcggcgtgtcgcaatcataataaaatcaacatatataccgttacataccactggtttgcgggtgctgcgaaaaccgtcatcggagcctggctcgccggaatcggagcatcgcatcggaacatcgcacgataatggaatcaagctcgaactatcgatacaagcatcggcgacgcacgtcgaggaaaggacggcaaggatgacggacttggagcgcatccgcgcgaagttcgctgcggaatatggcctgtcggaggacatgctcaggaacgcggaacgttggacggagaccacgggcgacctcgaaggggttcccgagaacctgctgccgggcattctgggaatgcgatttggcgcgatcgccatcgatacgccgcgttccgaacgctggagcacgccggaagacatcgatgtaatcgccgacctcgcctacctgccggatggcgggtacgatacggccgcgggagcgtgccgcggccatttgctcgacctgtatctgccgcatgacgcggtattgcgcggtgggcacaccctgccggtgtacatcgatatccatggcggcggattcacttacggatacaaggagctgaaccggaatttcaacgtgcatctcgcggaacagggcttcgcggtgttttcattgaactatcgtccggcgccgcagaccgacttgcgtgggcaattggccgatatccaggcggcattgcgttggatcgcagcccatatggccgattatccggtcaatccgaacgcggtgttcctcaccggcgattccgcaggtggcgcgttgacgctactgaccttggccattgaaaacaatgcggaagccgcggctgcgtttggcgtcgacaagccgtccggcatccgattcgcgggtgccgctccggtgtgcggcgcgtacagttcggcgtcgttggagaccatgggccgcaagctgacggtcgggtatgacccgaaccgccgtatcggtcttgagcagatgttgggcgtcgatttctttgcggggctcgaagccgccgatccgaagttcctcaccgctgagggtctggcgttcaacgtcgatctgccacccttgctcatcatcacctgcggcgacgatttccttgaagccgacaatctggcgttggccgccgccttgtcgcgcaaaggcgccgattttgaattgttcgacccgaagccgcgccgccatgagacgttggggcatgtgttcgtcatcggcatgccatggcttgaggaaagccgggaatgccttgatcgaatccgccgcttctcatacgaacgctgttgaataacgtgaatggggtgaatactcctccggagtgcccgccccattcaatggccgtcgatgccgcgacgccgtatcagcggcggaccatttcctcttcgatctgttcgagcgacttgcccttggtctcaggcacgaaacgcagcacgaacgggatggacagcgcggagaacacgccaaagatggtgaacgggccgccgacgttgttgccgaacatggccagcagcatgaggaagaactgggagaccacgaaattgcccagccagttggcagcggaaccgaaggagctgccgatgccgcgcacgctcaacgggaagatctcgccgatgagcacccatgcgatcggaccccatgacagcgcgaagccgaggatatagcaggcgatcagcaccatggtcggcacggccagcgtggccacatcgccggtgaagttaagcacggccagcaccgcgagggcgatggtcatcgtcaccgatccgaagatcagcagcttcttgcgggggaatttgtccatgataagcgtggccgcgatagtggccacgaagttgaccacgccaatgccgaccgacacccagatggcatggttttcggggaatccgaagcctttgatgaacacctgcggcaggaaatagatcacggagttgatgccgacgagctgctggaacagcatgatgccgatcgcggcgacgagcgcaggacgggcgatacggaacagctcgcggacaccgcccttggtgttctgcgcggcgacggccttgatctcgtcgagctcgagctgcacctgcgtctgatcgacgtccttgcgaataagggtaagtactttgaacgcctcacgatccttgcctcgactcaccagatatcgcggcgattccggcagcagcaggccgccgatcagcagcagggccgccggcacgagcgccgaccccagcatccaccgccaatcgcggatgccggcgatattgtggccgaggaagccgagattggacgcgtatgccagcaggatgccgaaagtgatcatcagctggaatagcgtggacagcgatccacgacgttccttcggcgcaagctcggcaagatatgccggagtcagcgaggaggccgcgccgacggcgagaccgaggatgatgcgggccacgaccatcatcaggaatcccgtggatcccgcgcacatgcccgaaccgagcaggaacagtatcgccgccagaatcagcagcttcttgcggccgaaacgatcggacagcgcgccgatggacagggctcccgcgcaggaaccgatcaacacggatgatgtgatgaacccggtctgagccacggacaggccgaaatcggattcgatgagcggcgaggctccggagatgatgccggtgtcgaagccgaacagcatgcctcccagcgcgccgaacgtgaagatgaacgcgctgttgagcgggaaacgtgtggaaacgccacgccccacctcccgctcgacggcgtcgatcgtcgcgccgacctcatggatgccggcttccaccgcaccttcggcgtcgtgtactggattggacgtctgcaccgcagtcatgattccaccttccattcccatcgatcctcatcgatatgagatgcagcaatcgcagcaaacaaaaaagacctggaacgacgtatagtgacgtcgttccaggtcttgcctcgcattgagtagcaaccctgccgcgcttgtatgctgcgcatattgcattcaagtgtaggtcatggcggcatgcgacactccgattttttagaaaacgtttaccggttatttttcagtgcaggaaagcgtgaagcacaggccagcggcacatgcttttccctcgtgcggagagcctcctcggatatccacgagcaagcggaccgaatcaagccgtcgaccatccacaagcaagacggcaaaaagaaagccggcggagagaaggccgccggctgagagagaagagagaagaagggttcagttatgggattcttgaaagaacctcgccaacagccgtaaccgttgacatgttctatataaccgcccgacccttggaggaacgatgtgtgttcctgtcaattccctgagaatttcgtagcggaaatgtcacgacggtgcgaattcgggggtttatcccactgaatatcgccccaacggccttcctgcagcttgttcagcgcggcaacagacgattgcacggcatctgccgacaccgtcatgaaacgccgctatacaacaccgccgctcaacgacgccgtgcactcacacgcaatcgcgcatctcactcggcgaatttgtcgacgcggcgatcgtaggtcagcaggccgttgagctcctcctccacgtcggaaacctgcgtatacacgtatcccgcaagtccgcgcgattccagtgcggccgcggaggcgagcacggaacgcacggcggcccgccaatcgtcgatcgaatcgtattcaccgtaaccgtaggcgcgcgacaccgccgcatgctccggtacgagctgcgccaatccgccgaattccgaaatcacgaacgcgcgtacgccgtgccgtgcgaccggcagcaccacgtaatgcgcggccctgcggcgacggcggtgcttcttctcgaattcggccacgtatccgcgcaacggacccttgtccgggtagatttccagcggccggaaatagttgtgcacgctatggaagtcgccgcaatgctggtcgtaccagccgctcgtcgcgtcgatcggacgggtcggatcgagcgcgtggatgcgttcggctgcatcgcacgcgtcgaattggccccagccttcgttgaacagcgtccacgtcacgatggaggggtgcccgccgagcatgtgcaccatcgcgtcgcacgtacgcgaccagtcgcgccggtagatcgggtcgtccgcgccgagcgccgtgaaatgtttggcggtgtcgtcgcggaatttgttccatgtgaagcggatgagcgtcggcttgcgattcgtggtccacgcattgtattcgccgtccgtgccgccgccggacaccgcgtcctgccagacgagcatgccgaggcggtcgcaatggtagtaccagcgggccgactcgattttgatgtgcttgcgcagcatgttgaagccggcgtttttcatggccgtgatgtcatgcgtcagcgcctcgtcgtcgggcgcggtcatgaggccgtccggccagtagccttggtcgagcacgcctttgacgaagagcggcttgccgttgagatggaagcgcgccacccccttcgtatccggtttgatttcgacggaacggaacgcgcagtaggaacttacgacatccatcggctgcgattgcgcgaccgccgcatcacccgccgtttccgcgggtttcgccgacccgtatcgcaattcggcccgcacgtcatacagatacggatcggccggcgaccacagatgttcggcagctgttgcgatttccgcacgcaccttgcgcacgcccgccggcagcgtctcatccgccaccaccgtgccgtccgcagggtcggtgacgacgatgtgcagtttcgcgttcggcttgtcgccgccgatttccgcacggacgaacaacttgccgtcggatgcccccttgagtgtcagcgtgcgcaggtaggcttccggcacgatttccagccagacgctttgccaaatgccgctttgcgcggtgtaccagatgccttcgcgctcgattttctgcttgccgcgcaactgcgtgcccgaatcgttcggatcgtagacgcacagcgcgatttcaaacgcgtcatcagggtcgataaatgccgaaatatcgacgtcgaacggcaggtagccgccgacgtgcgtgcccgcgagctggccgttgacatagcaggcgcagacataatcgaccgcttcgaaatgcaggatgaggcgattcgcgtcgccgatctgccggaccgtttcctctccgccgagcgtgacgggatgcacgacggtgcggtaccacagcaggttgtcggggtaaatggtctggtgcacgccggacagcgcggattccggcgagaacggtacgaggatcttgccgtcgaacgtttgcggaatggcggtttccttgactgcgcggaccgcttcgtcgcgggtcagcatcgccgccgttttgcgccatttcggcgcggtctcatcttccggaatggacgcgatcgcgtaatcccaccagccattgagcatggtgcagttgtcgcgtaccatggtcgggcgcgggtgctcgccgagtatgggggtacgaccctcgtccagcgtgcgttcgccttcctcggcgggattgaacgccttgttgccggcgcgcgcggacagccattcatggtcgattcgttcaccccacggtgtccacaactgctgcagcggctcacgggaacgcattttcgtaggagcggccttcagtacgcgtttgatatccagcatggagagccccttcctgcagccttgcatatctccgctctcattgtaaatggcggtcgcgttaaatggcagatgaatggcaagcgatttttgcaggaaagtgcgcgaatgtgccggaaggcataggaaagcagaagaatggcgattcaaaagccacgcgatatgtcacgatttgaaaaagtgctgtaattttcaaatcgtgacacatgtagggggttgcgtgttgaaatcagccttccagcttggccttttcagcggcaaaacgagccgcttcagcctcacgacgagccttcagttcggaatcgaagcgggcgagctcctcttcgacggcctccggcggaatcttcgcgaagatcgggtgcggcttcggcaccgaggtgccggccacgatcggctcggaagcccacggatgcacggtttcgcccagcttgtagtcgcccgtgatgatcgggtacgtgaagcccggcttgtcgagatcctcaacctcttccagatgaggcagcggcgagaagacgccggttccgccgagggcctcccacaccttctgtgcggagtgcggcaggaacggggccagcaggtggttggcgtcggacacggcctgggcggcgatgtgcagcacggtgccgaggcgggccggattgtccttgatcttccacggttcggtggcggagatgtacttgttgatgtcgccgaccacgcgcatcgcttcggacagcgcgttcttctggcggtgattctcgatgagtccgccgacggtttcgaacgcggccttggtttcggccagcagcgcacggtcctcgtcggtggcggaagcctcgtcgaacgccggaatctcgccgaagttcttgttgatgaggttggccacgcggttcaccaggttgccccaggatgcggcgagctcctcattgttgtggcgcacgaactcggcccaagtgaagtcggaatcggagctttccggtccggccacggagatgtagtaacgcacggcgtccacggggtaacgggcgaggatgtccttcacgtagatgacgatgccgcgggaggacgagaacttcttgccttccatggtcatgaactcggaggccacgacctgctccggcatgttcagcggaccgagcttgccggtttcgccgcccttggagccctggccgttgtaggccagcatttcggacggccagatctgggagtggaacgtgatgttgtccttacccatgaagtagtagcccggggtggtcggatcgttccaccatgcgcgccatgcctccgggtcgcccttgcggcgggcccattcgatggatgcggacaagtagccgatcacagcgtcgaaccacacgtacagcttcttgttcgggttgtcgatccagcccttgaccggcaccggaatgccccagtcgatgtcacgcgtgatggcgcgcggcttgacttccttgaacaggccgatggagaagttgatgacgttggtgcgccagccttcgcgggtcttgagccacgcgagattggcttcggcgagcgccggcaggtcgaggaagaagtgttcggtttcctcgaagcgcggggtttcgccgttgatcttggatacggggttgagcagctcgtccgggtcgagttcgttgccgcaggcgtcgcactggtcgccacgggctccgtcggcgccgcagatcgggcaggtgccttcgatgtagcggtccggcagggtgcgtccggtggacggggagatggcgactttctgggtgcccttgtagatgtagccgttttcgaggcactgtttgaacagttcctgcacgaccttttcgtgattgccagtggtggtgcgggtgaacagatcgtagctcaggccgagatcgcataggtccttggcgatcacgcggttgtagcggttggcgagctcctgcgcgctcacgccttccttgtcggcttccaccaggattggggtgccgtgctcgtcggtgccggacaccatcagcacgtcattgcccttcatgcgctcgtagcgcgcgtacacgtcggacggcacgccgaagccggcgacgtggccgatatgacgggggccgttggcatacggccatgcaacattcaccaaaatatgactcatggtgcccgattatacaaagcgccatatcccgtgttttcggcgcattccgattggcggaagacgggcggatggggtcgatgacgttctcgcagaccggcctgcgtcaggctacggtagtccacaaggttatccacattgttgtatcacgcaacaatcatcgtccacttatccacttttttcgcgaagccggtggcacgccgctttccgtatcagctacggtaccccgcatggatacctcccctccccttttgggcgacgccgacctgcccggccccatttgtttgaatcgtttgcattccctaggcgtggtatgcaaacttgacaacgacaacgcctactcgtatcacgattcgcgcacgctgtacggccgcgccagcatcatctcaacgctgatgccgagccgttccgtggcgtgcgccggcaccgctgcgtgggtgtggttgggtggcatgtttcccaacacgatcgacatcatttcaaaagcgcattaccgaacggcgaggtacggtcgcaaagtcagcgttttcaaccgacaggcgcccgacgaacatgtcaccgacgtcggcccgatcaccgtcaccacgcccacacgcaccgcatgcgaccttgccatgaactgcacgccggaaacgcagtcgccggtcacggaaatcgtatgcatgctcatgcaggaattccggttccgccccgacgattgcctgcaggtcatgcaggaggccacccatattcgcaacgcgccacgggcacgccagtttttccggacgattgacggaaagcagtgacggatatgcgtgaatcgcaacggccgtcggaaaaaccacggcagacgagacagacgggacagacacggcaagcgtctgcacagtcgcggcgcacggcaagcaagagatatgaagagcgcgcgaaacgtagcaaacgtcatgggcaacgacatgaacagcatggacaccacggcaaacgccacgaacgacgtcgcgcgccgccgaaatatcagccgcacgcgcggcagcgggcattggtcgaaccgcctgcgccgccgatcgaattgacgccgttggtggcgtgcagcgccgacaccgcgcaagatgtgctgtggcatatcgcggaatatgcgccgcgattgcgcaagtggctggtcgccaatccttcggcgatgcctgcaatgctggaatatcttgcgcaggtcggcgggccgggtgtgcccgaagcgctgcggatattgctgaaatcgttggaaatgaacggttccggaagcgatcagcccttcatcgcaagcacggcattgtagacctgcttgcgattggcgagcgagccgtcagacagcggatgttcggcgacaacctgtgaaatcgcgtccttgatacgcaggttgtcttcctgcgcgcggtcgactgacagcaccgccagatcctcgatggacagcgttgcgggcgcggcagcgtcggcctcctcctcggaagcgccggcgatgacgagcaccatttcgccacgcggcggatcgtcgacgacgctttggcggatttcggcgatggttccgcggcggatctgctcgtaatccttggtcagctcgcggcacaacgccattttgcgattcggtccgagcacgtcaagcaggtcggccatggattcgtcgatgcggtgcagggtttcgtagaagacgatggtgcgacgttccgatttgagcgcgcgcaggtgctgcacacgttcgctgtgcttgcgcggcaggaagccttcgtagcagaagcggtcggtcggcaggccggacaggcacagcgcgtcgagtacggcggacgggccgggagcgcaggtgacgggcaggccgcgttcgatggccctgcggacgatcgccagtcccggatcgttgatggtgggcatgcccgcgtcggatacgacgagcacggtggcgccttgttcgacctggtcgagcagaccgtcggccttgtcgcgttcgttgtggtcgtggtaggcgacgacgcggccgggcacgcggatgccaaggcggttcgcgagcgcgtataggcggcgcgtatcctcggctgccacgatgtcggcgccttccatgagggcgatcaggcgggcggacgcgtctccggtgttgccgatcggcgtggcggcgagcacgaccgttccgcgcggaatgttgacgtcggcgaccagtccgtcgagcccgaattcggcacgttccgtggcttgcgcggtttcctcggcattttccgcgttctcaccgatttcggcaatctgaccaatatttgttttcacggtttgtttcacggcgttaccagccttctcggcatcagtctgttcgctcaagttctccatatttccagtatcgcccacagcgtccccaaaccatcagcccccgccatttctccgcctttcgcaaccgaccaatcgaaacccgaccaaaccaccgacgacgccacacgccctcaccggtaaatcaaaatgcacccctcacacatccgggtttccacccgccacgcattcggatttttcttcgtacaacattcggattttcctttgcgtaggattcggattttctcagacgagggtgagacggcgattcaacacgactttggacatgccatcgatagcatggaatcatgcgttattttgaagatgaaatttccggaatcgacggcagcacggccacgttcgtcggctactgccttgacaacagcagcgaaatcgacccgaatcgcaagcgcccgtccgtgctggtgattcccggcggcggctacgaaatgacgtccgaccgcgaagccgaaccaatcgccatgcaattccttgcagccggcttcaacgcgttcgtgctgcgctattccgtgaaaccgtccatcttcccggtcgcgttgctggaagcggctgaagcgatgcggcggattcgtacgcatgccgacgaatggcattgcgatgccgacgcgatcgcggcgatcggcttctccgccggcggtcaccttgccgccaatcttgcgacttccgccagcgacgacgtgctcgcggcacatggttacgacgcggatgcggtgcgcccgaacggcctgatgctcgcctaccctgtggtcacgtccggcccgctcgcccaccgcggcagtttcgatgcgctgctcggcgaccgcaaggccgatccggaagcgctcgacgcggtttcgatcgaaaagcatatcgacgcgaagacgccgccggtgttcgtctggcataccgttccggacgattgcgtgccgtatgagaacacgctgatgctcgtcgacgcctgcaagaaggccggcgtgagcgtcgaggcgcacctgttccccagcggcggccacggcctgtcgctcggcaccgccgaaaccgcatggcagggggtcaacggcatcgaaccgtgtgtgcaggtctggccgaaacttgcgatcgcgtggatgcgtcgtacatttgcggataccgacgctgccacgaccggctctgccacagccgacgcgattgccgaataatcgccattcctgcgtttttttccgcgtcttttcacgtcttttttgtcgcacgacttcgcttttcggaccaaaaaacaagtcgtgcgacatttaatcgagtaaaataccccctaactggcattttccgggcgaaaacggcacttagggggtattcggcgtcgcacgacttgaaaataaccgccaaaaatcaaagtcgtgcgacgttttgcgccacctaatcgccaaaatcagatgggacgcgactcgtgcaccatctgacgatcgccgtaatacaacgagttcaggccaggattcgccggcgtgccccacgcggacgccggacgcgccggacgcaccggacagccgctgagcacgctggacagctgccggacaaccattgaacaaccaccgggcaccaccggccgaacaccaccaacaagcacgcgcccataggcacatattgacgatttgtgcagatttgccacccgtcgtcgcactgcggcgcacactgcatagacccgttggtagtctgtgattggttcgcaacggcacattcgttgcgcacgatggaaaagcaagccacacgaaccgaccccgcgcaaccgcgcaaaaacacacagagagacccatgaatatcatcaatttcttcgtcaacctcatcaaggacccccgtaccgcgatcgccagctggatcgcgatgggcgtcgccccgaccctcggcttcatcttcctcatcgtcttcatcgagaccggtgtggtcttcttcccgttcctgccgggcgattccctgctgttcgcggccggcttcttcgccgcgcccgacgcgaagaccggcgtgtccgcgctgccgctgttcgcgctactgccggtggtctggtgcgcgccgatcatcggcgaccagtgcaattactggatcggccacttcttcggccgtcgcatcctcgaatccggcaaggtcaaggccatgactccggagcgcatcgagaagactgagaagatgatcgagaagtggggtccgctggccgtgttcctgggccgtttcttcccgttcatccgcacgttcatgccgttcatctccggcatttccggcatgcgctggagccgcttcacgccgttctccgtgctcggcggcctgtgctggtccacgctgttcacgctgctcggctatttcttcggcggcattccggccgtgcagaagcattttgaattagtgattattgcgattcttgtgctgtcgctgattccgacaatcgttggcctgctcaaggccaagttcggcaagaagaagccgactgccgaggacactgcggaaaccgccgacgccgaataagcagcgttcaatcgtcgtaaaaatatcggcgaatacaacgcaagcacaacacgcggagtgtggaattgcatttttccacactccgtactaatatttcgagagttgtcttgctaaacaaggtgacgcacatggggctgtagctcagttggtagagcgcttcgttcgcatcgaagaggtcgcggtttcgactaccgtcagctccacgaagcccgctgcattcattccaccgcagcgggctttttcttttgttttccgcggtttccggcatttcttgcgattcccatacgcactttccagcgctcttcgcaccgtgcatacgcccgtccgcacgtacgcaccgcgccgtccgcaccggccacgcaaacgcaacccagccgaatcgccatacatgccgacttctaaaaagccatttaacggggttattttcgcgatttttacgattttaaccccgttaaaatcgcatttttcgcaaaacccgtacgatagtccacgtcaaacagtccacacaaacccaaaaatacgttaaactagcgttttaacggggtcatttttgcaattttcgcaattttgaccccgttaaaccacatctcagggattatcggtatctaaaaagtcacaaggagcaccacatgagcacctatcgcagagagcactatttggccaagctccgtcctttctacaacgattccggtctcatcaaagtaatcaccggcatccgcagatgcggcaaatccagcctgctcatcacagttctcaacgagctctttgagcagggaatccctgaaaccaatctcatctacctcaacctcgatcgccgcgaataccgtaatgtgaccactccggaccaactcgatcaactcatcgaacaagccatgtcgaatgcctacggtgcaggactgcgttatctgttcatcgatgaagtacagaacgtgaaaggcttcgaaaccgtcatcaacggctggcgggaggaaggtaattgctccattttcatcactggctcaaattcctatctgctgtccggagagcttgccacgaaacttaccggccgctatatcaagctggaaatgttcaccctttcctttcaggaatacctcggcatgcggaatttcctaaacaaaccggaaattccggtatcgcaagccttccgcgactatctcacatacggcgggttcccgaaatcgctggaatatgacgatcccgacgaaaaagccgcatatattcaagacgtcatcgggcagatcttcaacaaggacatcaccgcccacaaaaaagtacgcaatcgcgatactttcacccgtgtgcaggactatctcatcaataatttcgcagcgcccacaaatctttccggcattatcgcgtatctgaaacacagcgaaggcatcagcatcaaacgcgaaacgctttccagctacgtccgtctgctggaaagcgccaaaatcctctacaagtgtcctcgcttcgatctgaaatcccgcaagtcgctcaggggcggggaaaaatactatcttgccgatcccggtatccggttcgcccgtaataccgatacgcgagtcagctacggtccgtcactggagaacgcgctatatacgcatctgcggtcgaaaggctatgacgtcagcgtcggcaccatcggcaaacttgaatgtgacttcattgtccgaaagcgcaaccagtacgcctatatccaagtgtctatgagcgttcaggatccgcaggtcgaggaacgcgaatatcgcccgttcagcaaattggcggacgggtatccgaaatacctgttcacattggatccgctaccattgcagcgcgacggcgtacgtcacctcaatctcatggaatttctgcaaaacgacggcgatatcgacttcgattaaacattaataatggcgattatgtcgtgtggcgcgccggttgtgcagacgcaccacacgcattgcggaggcgtcaggcgttgcggctacgtacgtaggcgtcgagcgtggcggcggtgatgccgtcgtagccgttgatcgaggcgaattgcgggccgtcggaattgtcgatgcgcatgaagccggtctggccgagcgtggtggcaccggatgcggccgcggagcgcaggccggacatggaatcctccaccgcgatgcaatacttcatgtcttcgggcgcgatgccaagcttgcggcccgccgcaagatacggtgcgggcgacggcttcttctcgacatcgtcatcgccgcacacgtaaccggcgaacgtgccggccggtgcctgcgcgatcaggttttccgccagatgacgcggcgatgtggtgacaagcatcgacggcacgcccgcctccttcagcgacagcagcacgtcttcgacgccatcgatccacggaatgcgttcgaattccttctgcgcaacataatcgatcatgcccttgccgatttcttcgatcgacagcttgcagccgtgctccaccatgcggcgggccacgtccggaaccggcgttccggaaccctgccaagcgaggtcctcatcccagtatccgccgtggtcggctgcgattttcagctcgccttcatgccaatacggttcggaatcaatcagcgtgccgtccatgtcccagaacacggctttgagcatcagcttcgaaacttcctgggcgccgttctggataccgttgttcagctcggtcattacgtttcctcgcaatcgttacgcttcgttctccgatagctacattcttcgtcagctacgaccatttcagcagagcggcacgacggaagcgcttcagcgcgcagaaaaaacaggacggttccatcaagccagtccgccaatcggttcataccaatcagctcgcaccaatcggttcacgcaaaccgactcatgcacaagccaattcgcgcaagacaacgcagcaaccaacccatagcaacggaggcacttggaaatcccccaagtgcctccgcaacgaacaacgcatccgacgaaatcggtcggccgcaatcgcagcaatccgtcatagaccccttttagacgaattgcaagacttgcgtgcgactactcctgagcctcctgctcctgagcggccttctcggcattctccgccttccagcgggcgatgcaacgctcgacgcgcttgtagccgatgatcttcggatccaagccggcctcgcggaaaatcgcggcaggcgagccaccctcggcatacctgcgcatgcagtcgtcacggaattccttggaatagcaaattcgatactgagtgactgattccacagcatcgagagaccccaggtatttgcgggtctttgcggtgaacgcaactcttggcattgtacgctcctaacctttctgtatccaccgcatgccctcccccgattcttcgcggaaataagcagtcatatttcatcgaagctgtaggccagccggaagaaatacgaacttcaacgtggatacgtaatattattcctcacaatagagacatcattgcgagacagatgcggcgttatgagtagttgcataccaaaaatcgggcatacccccgcgatatatgcccgattttgctgtttttttagatttttttagggttttccagcgcttttcaggaaagtcagcgaatgggctgtcagcgaattccccaaactaccactgacctggagcccatatcgtccccctcttccgcacgttccgcccgtacggattcgcgcgacggaagctgccgtgcatcggctcgcagctgcctgcgccacatgcgcgcgcgctgggaccgctcgacttccacgatgccaccgtccgcgtccgcggcgaacacgctggaaccggccggcttgcgcagccgctccacttggcggcgcagctcgcggttctcctcctcaagttcgaggatgcgcgtgattccagccaggttgatgccttcctcctggctgagttgctgcgcttgcgcgaggcgggagatgtcgcgcagcgaatagcgtcgcgcgccaccttccgtacgttgcggtacgaccaagccaaggcgatcatactggcgcagcgtctgcggatgcacgttggcgagctcgccggccgcaccgaccgagaagacgggcagctcgatgtcgaaaccgacttcggcggcaccgtccaggtcggcccggccggccacgatcgccatggcgcacatttcatacagccgcttgatctgccgtgcggcgcgcgcttgggaggcttgggaagtccgcgatgagcgtgccatggcggtcagcgctcccgaacgagctcgtcggcgaagtcaccgcacgccttgtcgaattccttcgcggcatgcttggcaacgaggttcggatgctccggaatgcggatctccacacgaccgaccaaatcgccgttctcgtgcggattggccacgcccttgcctgcgatgcgcacttccgcgccgctggacgagccggcgggcactttgaaggtgatttcgttgccgtcgatgtccttcgccgtcactttcgcgccgttcacggcttggctgacggtgatgggcagcggcatgatgatgtcacgtccgcgcagggtgaatttcgggtcttcggcgacggtgatatgcaggtacagatcgccgtttttgccgccattgcggcccggcttgcccttaccggtgagacggatcttctgcccgtcgtgcacgccggcggggatgtgcgtcttgaacttcttgccgtccgcggacagcgaaaccgtggctcccttgacggcctggcggaaggtcaggcggatcttggagttgcggtcctcgccgttttccggctgcggctgctcgtaatcgtcagtgccgtagcgttcgtaggcggagcctgcgcccgggccgcccgcaccgccgccgaacatcgagaagatgtcgttgaggttcggattgccgccgccattggtctggaagcggatacgcgagccattgccgcccatgcctgcgccgccgccgaacatcgagccgaagatgtcggagaacgcgcccgcgtcgaagccgccctggccggaaccgccggcgaaacgcgcgccgcccatgccgaactggcgaatcgcatcgtatttctgacgattctccttgttgctcagcacgtcgtacgcttcggagatgtccttgaacttctcctccgcttccttcgtcttgttcaggtcgggatggtatttgcgcgccagcttgcggtacgctttggtgatttcggcgtcggtggcgtctttggagacaccgaggaccttatagaaatccttgctcagccattcattctcagccatgatgtgcctcctttcgtgaggttttcatgcagtaaaaagtacagtttttcaaactttcaaacagttgtcgttgaaccgttgtttcaggtaatcgaaggcccctcgtttttcagaggggcccgattactcgtcacatgcgtttcgcgcggatacgcggattgtgcgaatgcgcgatcagttctgcggagaagccacgaccacacgggccgcgcggatcacgcggtcgccgatgcggtagccggcttccaccacggtgtcgacggtttccttctcggcattcggatccggcttgtgcaagatcgcgtcatgcttcgtcgggtcgaaatcctcgcccttttcgccgaacttctcaacgccgaacttctcgaacgccttgtcgatcttgttggcgacggccttgaacgaatcgtccatttcgctgtgttcgcgaatgcggtcgatgtcgtcgagggccggcagcagggcggtcagcacgtcgatgatgccgtgctgacggaagcgttcctgctccttctgcgcgcggttgcggaagttgatgaactccgcgcgttcgcgctgcagcgcctccagatattcggcggcttccttcttggcctggccaaggggggtcagcgtatcgtcggccttgccgtcggcagcgtctgccttgtcagcaccgtcagcggcagcggaatcgccgttttcttgcgattgcgcggcagccggctgagctgcaccttcctgcgttgcgccagcggcggcagcggcggaatcggcggaagcgccgtcagcagcggaagcggcggccggggcggcctgcccggacaggtcatccatgtcgggcaggtcgttcaggtactcgtccttgttgaaatcggacatgattacttgttgtccttgtcgtcatcgtccacgacttcggcgtcaaccacgtcgtcgtcggagccgttggatgcgtcggaggtggaaccggcagcacccgcggcgccagcggcaccggcggcgtcggcggcaccctgctgtgcgtagagggcctggccgatcttctgggcggaggtcatcagctcggtctgggcggacttgatcttctcaatgtcctcacccttcagggcttccttgagctcgttgaccttgtcggtgacttccttggccacatcgtcggagagcttgtccttgttgtcattgacgagcttctcggtctgataggcgaaggactcggcctggttgcgggtctcggcgtcttccttacgcttcttgtcctcggcctcgtgggcttcggcttccttgaccatgcggtcgatctcgtccttcggcaggccggaaccaccggtgatggtcatggactgttccttgccggtgcccttgtccttggcggacacgtgcacgatgccgttggcgtcgatgtcgaaggtgacttcgatctgcgggacgccacgcggagccggagcgatgccggtcagttcgaaggtgcccagcggcttgttgtcgcgagcgaactcacgctcgccctggtagacctggatgagcacggacggctggttgtcttcagcggtggagaagacttcggaacgcttcgtcgggatggcggtgttgcgctcgatgagcttggtcatgataccacccttggtttcgatgccgagggacagcggggtcacgtcgataagcaggacgtccttacggtcgcccttgatgacgccggactgcacggctgcgccgacggccacgacttcatccgggttcacggactggttggcttccttaccgccggtgagctccttgacgagctccttgacggccggcatacgggtggagccaccgacgaggaccacgtggtcgatgtcggagacgccgatgccagcgtcgcgcagcacgttgttgaacggggtgcggcagcggcccagcaggtcggaggtcatttcctcgaagtgcgcacgggtcagggtctcgtccagatgcaccggggtgccgtcaggggtcatggccaggtactgcatggagatggaggtgctggtcgagctggacagttccttcttggcctgctcagcagcttccttcagacgctgcagggcgatcttgtccttgctcaggtcaacgccgtacttgttcttgacttcgccgacgagccagtcgatgatcttctggtcccaatcgtcgccgcccaagtggttgtcgccgttggtggcctgcacctggatggtggagaagccgtcgtcgtccttgccgatttccagcagagacacatcgaaggtgccgccgccgagatcgaagaccaggatgcgctcgtcttccttgcccttctcaaggccgtaagccagtgcggctgcggtcggctcgttgatgatacgcaggacgttcaggcccgcgatggtgccggcgtccttggtggcctgacgctgggcatcgttgaagtatgccgggcaggtgatcacggcgtcggtgaccggttcgccaaggtaggcttcggcgtcgcgcttcagcttcatcaggacctgtgcggaaatctcctgcggggtccacttcttgccgtcgatctcaacggtccagtcggtgcccatgtggcgcttgacggagctgatggtgcggtcgacgttggtgacggcctggcgcttggcgacttcgccgaccagaatctcgccggacttgctgaatgccacgaccgacggtgtggtgcgagcgccttcggcgttcacgataacggtgggctggccaccttcaagagttgcgatgcaggaattggtggtacccagatcgatgccaactgcgcgtcccatatttggtctcctttgcaataggttcgctatacgttcttttcgttcttcgctcgagtttcggatcgccgtttccggattgccgtctctcatgctttccaaaacttgagcctacaccactcaactttgaatcgcaagttattattcccgaaatcgcaaaaattcttgagcacacctcactcaactttgcgcaaaacccaaaaccgccggcgctggggagcatctcagcggcggcggtttcggggattatcggaggttattcagccaatcagcggtcgttcttggcggccttcgcggtcttgatgagcatcgcgacggcaaccagcatggcgatcgcaacagccgcagccagcacagcggtgccggtcttgccgagcagtgcggcgccaaacgggccggccttcgtatcgttgttgaccttgccggaagcgatcacgccgttcttgtcagcgttgccagcgcccggcttgccgttgttcttatcggcggagttggcggccggagcctggaagtcgacggtcacggccttgccggactggcggccggtgacggtgagcttgtattcggaaccttcggtgacgccgtccagcgcgatcggagtggtctgtgcggtcttgacgcgcacgccggagagcggagtggaggaatcggacgcggccacggtcttgtcgttcttgtccttcagctcgtagctgagcacagcgtcgccgttgaagccatcgacgtccgcggtgaacttaccgtcggcagcagagaccttcacagtgccgttgtcagacagtgccttctgcgattcggtggaagtggccagtcccagagcgccagcgatggtgtagaagttgtcggtctggtcggtctggtcggtcaggccgatgacgcgctgtgcgccagggccggaagccgcgatacgcagctgggtgccggtgtgctccatgtcgccgccgttgtagccgccgtctgcatcgcgagaatcgtcctgggcggtgccgtaggagacgaccatgttgttgccatcagcggtcttcagcacggtggacagtgcgtaagccggctgggcgttgaggatctgggaggtgtgcgcgtggtcggcggtgacgatcaccagcgtgttcgtgaggtccacgttctgcatggcgtaggcaatggcctggtcgaagtcgtcggtctcgccaatctggccgcaggcattgcctgcgtggtcctgcttatcgatcgaggcgccctcgacctgcaggaagaagccgttcttctggccgttcgggttgtcattcagcaaatcgagcgccttcttggtcatgtccttgagcgaggagccctgattgccgagccagtcggcgttcggggtgcacacggtcgggttggcgtccttagctggatccttgtcggtggccttggacgggttgaacttggtcggcatgttgccgtcactcatcagggcgagcactggctggccgtccttgtactgcagggcgttcatcgcggccggatcgttctcgacggtctggaagcccatttccttggcctgctcccacacagtcttgcccttgtattcaccgccctgcacggtctgacggaagtacttggaaccaccgccgatggttacgtcggcgcgggtgtcgagcagctgctcggagatggagccgatgccgccgttttccttaagctggttgatgaggcactgcttggaggcattgttggacgtgccgtcggtcttgccctgtgggccgtagcaggcacgttcggacgaatgcgattccagcacggccggggtagcatcctggatttcggcggtggtcacattgccggtggctttgccggccgccttggccagctcgaagaggttcagctgcggattgccgtaaatatcaacgtcaacggcgttgttgtaggtcttggtgccggtggcccatgcggaaccggatgcggaggaatcggttacgggggtaagcttgcccggattggggttggcgaccagcttgccgtcgccatccttgccgacggcgctgtccttgctgccgttgccgacggagaaggtcgtgtactgaccggtgccggcctgcacgtcgtcaagcgcgctcggctggccgaccgcgtcaagtccgtcgaagtggccgttggcgcccttcagatagtcgcgggcgacggtgatttccgaatcgcccatgccgtcgccgaggaacaggatgacgttcttcgcgttcttgttgccgatggtggcgatgcgctgcgcgccgccatgcttggcgagttccgcgaccggcttgccgttggggctgtaggtggtgtcagctgcgagcgccggtgcggcgagcgcgccgagcgttgcgacggaggcgagtgctgcgatcgcgcccttcaaagctttgtgcttgctcatgtttcttctttcttccatgcagtttcttccgtgccgtccaacctgccgtttcggttgcgcccgttaggtaacgcccgtttcgaccatgttttccggctgcgcggaacctttccgcggctgcattgcttggatctttcgatgccaccgcccacgctatgcgccgcaagccaacgcacaccgcactacagaagaacgacagatgaacactcatcgccatatgatgaccgcaacatatccaccgcatgaacagggggaatacggccaataaaatcgccatattccgtcaaacaacacccccaccgcaccccacaagccaaaatcccccactggctggataaatccaacctctcagaccccactcacacgccaaaaatcccagtgactggataaaaaccacctctgacgcaccactcacgcgactaaatcatccagccactgggaaaaatgcccgcgccactcagccccgcgcaacccgcgccgcgcgcgtggcctttacggccacgaacacggaccgcaccagcagcacgcacagatagcaggcgaacataatcgccccaactcgtggcgaaacctcccccgcaatccacgtgccgagcggcgcggtcacagccgccgtcacgccaataatcagcgcggttttcacatgcgctagcctgcgcttcaagttcgccgcgctggtcgtgatcgaattcggaaacattgccaacagcgaagtgccgcgcgcaaccaggtcggacgcgccaaacagcatcgacagcgacggcaccgcaagcgcaccacccccaatgcccagcagccccgccagcgtgccgatgaccacacccagcaacgccaagccaatgccggtcaccaccgtcatgacgatctggtggtcgcgcgacggcacaaaactcacctgattgatcaccacaaacacgagaaacgccacgaaaatccaccgcagcaccaattccggcagccgcgacagcagccaactgccgatctgcccgccgacaaacataccgcaaaacagcaacgccgcggcgagccagtcgacgtgcccgccggtcgcgtacgaaacgacgccggaaatggaggtcggcacgatcgccagcgtggacgtggcggccgcgttgcgttgcgacaggccgagccagacgagcgcgggcacgatcaccgtgccgccgccgatgccgaacgtgcccgacagcacccccaccaacatgccgaccacaatcagcacgatgatgctgcgcgccgacccgtcaagcgccgtctcccccgctcgcgattccatcttttgcgattccgttcgtacggcatccgcccgatccgcagtttccccttcatcacacatggcagctccttccacgtcttccgcgcccgatactacccacctgccgcgcgcagcaatcagccgattccataattttgcgatttcgccgccgcagcgcccggttcacgcgctttctcgcttatagatggcggattcgcgggatcgacggatggtatctcgcttatagatggcggccccttgcggaaacaagacatctagggggcatgcatgctaccccctaacgacctattgcccaaaccgacccgccacctataagcgagataccaccggacacccggccgaatccgccatctataagccagatacccagccaaaaccacgaccgcacgcctacacccacgcctacaccggcacacccgcgcgcctacacccacgcaagacccattgcacacacccccgtacgcacacgaccgcgcgcggaccggcaaaatcgcaagtcatgagcgaaaaggggcatcaaaagcgtccgaaacagcccgaatcacacccccatccgctcacagacaagcaaaaccagcccaactcacaagtcgtgagcaaaaggggaggccacccaacatcaaaacagcccgaaacatccagaatcgtacccccatccgctcacaaccgcgccaaaaccgtcaaaaccgcaagtcatgagcaaaaggggcatcaaaagcgtccgaaacaggccgaataatacccccatccgctcacaacccatgcttcagcacgattcaggccatatgcgcaccgcaacaacacccctgcgcaacatcagacatgcacacgcacgcaaacacaagtacacacactgaaacgcaacacgtaccacaagcacacaaacaccacgcaccacataccgagcacgaccagacgcacacccccgcacaccggagaagcgatgtcaccggcctgcggcggcgctaggctagacactacccccgaacaccagacgaatggcgcgcgccggccccggcgcacaacccgtgccgcacaatccaggagcgtcgccatagccgcgcgagccccacaaaagcgcagccagccacaaacacgagcagtccgatcaccgcagccgccacggctgtcatttcgcccggctcgtcgtattgcgtcttgtctggcactttcggattcggaatccggtgcccgcgcacgagcagcctgtgtgagttgacaccgtacggcgtgcacgtaatcagcgtcgcgtaatcggccccggactcaatattcagtttgctgatttcgctcggcagcaccactgagatctggtccacttggtacgtgtaggtttcgtcgagcacgtggaatgcgaacgtgtcgccttttttcagttcgtcgaggccggtgagcagtcgcgcggatggcagtccggtgtgtccggagaccaccgcgtgcgtggtcgctccgcctactggcagcgaggttccggccaggtgtccggcggcgatctgcagtacgccgtcgctggtgccgtgatagacgggcagtttcactttgatgcgcgggatggtcacgtatcccatgatgccggtgccggtcacgtcgagcgtttcatcatattcgcgcttctgcgcgtcggtcatgtgccaccgatcgccgttcgcggcgagccgttcattgtattcgtgcgccgctttcagcatggccttgcgttcggcgccggacatgtctttggtctgttccacgtagcctgccacggcgtatgactggtgcatgcggttccaccagtcgctgaatgtcggatacgcgatgagacccagcgcaccgatcatggcgattgcggaaatggcaatcatcacattgagcagcgcattcgatttcttatgcttggcagccggtttaacctgcgcacccggtttaacctgcgcatccaattcgacttgcgcagctggcttggcgtccgattcatccgtcacgttatttatgctacgcccgcttccgcaaagccgtcttggcaacgatcagcagcaccaagcccgcgcccaagatggccacggcaatccaagcggcctgctgcacgtcggcgccggtgtgcggctggtccggcgtggtgggtggcgtgtgcgtgttggtgatttcagtggagtcgccttccacatcggagatggtggtgtagccgtcgggcaccgccgcttcgaccacggtccattcgtggtccgcgtcgagcgctgtccacaaatgcgtccacttgttggactcgttcagcttcacgttttccacgggctcgccgtcgcgcaggagtttcacggtgatggattcggggcgcttgccgtcagaattgttccggtcattccagattttgcgcacggtgcgttccacggttttcggcggttgcgccacacattcggttttcggttcgatactcagcacacgcgacccgccggagacgccgtcttcgggcactgcgacgagcatgctgccggaagagcacgtccatgtctggttctttccggaggcgttggcgaccttcacgtcaacgctgtcggacacggccaagtacaggccgtcggacagtccggtgaaggtcagatgcccggaggtgttggtgacgccggttgccgtggcgtcgggttggttcaccgcgatgagtccggcgagcgtgttggccatgtctcgccacacctgcgcgtccttgccggtcatcttcgaccagtcgacggggtaggcggtggagtcggtgaacggtgcgacgggttcgaatgtggcgccgccgcttgccgggatctgtccgactttgtagaggttgaagctggcgtccgaaatggcgaagttggtagaatcgtcgccagtttcggagtccgagcttttatgttggtaagaaatggcgatgctgccgctggcagagtctgttgttggcgccgcgacggcatcgcgagtagtgaatgcacaggctgccgcggcgaatgtggcggcgattgcgcagcatgcggcgatgacgcggcttgcgatcgtgcgttccttcattgccgacccctcttctgtggattggaaagtaagcatgtttgattcgcccccaacggcaaaccggaaaatatatggagccaggctggatactcaagaaaattaggcagtgtacaagggattgaggtggtccagcccagcatatgtgggttcagttattatttaatttttagtttttaaattatgtattgcgattcccgtgagccgctgctgacttgcgtcaacgcggctcacgggtttcgcatggttacttcagattcttatggaatccggaggatcaggcgttgcgacgacgcagagccatcaccagggtcgcgccagcaagcacgaacacggcgataccagccacgtacagcagcacggtgcccatgccaccggtggacgggaggttggagcccttcttgttcacgacgctagtggcaacggtaccagtggcggtgtcacccttagtctccacattcttgacagtgatagtcaggttcttcagagccgggctctcagccgtctcatcatgggtagccttgatttcaaggtaggtatcgtctgccttgttgaagccgtccggcaccttggtctcgacgagcttgtacaggccgtcgtccacgcgcgggaaggaagcgacgtacttgccatcagagttcttgacaaccttgaccttagcgacttccttggtgtagtcgtcagaagcgccaaccttcttgtagagggtgaactcaggcagatcgttgtcgttgacagtagcgttgaagttcttgttgacatccagctggtaggtgaaaacgatgacggtatcttccggagtcttaccggtttcgccttcgccacccacgttcgggttgttggagtattccagcgagaccttgttcgggttgccctgagcgccgataatggacttttcgttcagagtggaagaatatgcaacagtgaacttgccgcctgcagtaacagcaatcggctgaccatccgtatccttgacggtcttcacatcgttgatggtgacgcggaaggtttcaccttcgttaagaccagtggtatcaacagtgtaggaatcggaggaaacgaccttatcgccgtacttgacagtgatgtcattgttgaaagtcagaccttcggactggctatcgtggaacaccagcttgtaggtcttatatgccgcaaaatcagcggcgtcggtcggcagagtggcggtcagctggaacggaacctcgtcggtcacatcatagtcggcggaatcctgccaaccggaagtggttccatcggaatcgttggtatcctggaccttcttttcgacagaaggctgatcggccttacgctcgatttcctgattaccaacaaccttgacgatgaacagcgtggctgcatcattcttgtctgcagtggaatccttgtccttgaacaggtagtagcccggtacggcagacagcgggctgtccttagaaacggagccatacacagtggacagcttggcgaaagcctgaattgccgccagcttggcagtgtcatccgcatatgtaccagtagcaatctgttcggcagcctgagcagcagtcagattagcaccgtcagtgccggccgcattcttttccttgaagtcggaaccagcagtgatattgctgagcactgttccagcatcattcagatcgcccttgaagatctggtatgcatcataggtgtgagtatcagtctcggggacagtgatctgatacttcgcagaggtagactcctcggcggttgcggtggaggcaccggcgaaaccggcgacggccattgccgcggtggctgccacggctacgaggcctttgagaaccttgttcattgttctccctttctttcttgtttgaaatttttggaatcttgagttattcgtattcagttattgcctagagggcagcgagttcgctacgctacggaccactcccccttctcctagacgcttccatcattgccgcctcctgaggctcaaggccagaccggccacggcaatcgccactgcgaggaatcccgcagcgtacatcttgtttactccctcgccgcctgtaccaggcagaacgacgccgggggtgttggtaatggaaccaccgtcaacggtgaatgcggcagacttctgatagccggcggtagtctccggcttgaaaccggaagacgtataccactcgcccttcacgttcgcgccttcggccggcccgatgcggaacacgtacggagtcgtatcgatgttgtacccgtcaggagccttggactcgaccaactggtattcgccccactcaaggccgacgatggagaacttgccggcttcgccgtcacgatccgtgtactgtcccgtctgcgcggagcaggtcttctcgctgctgttcacgcaatccttgatggttgcgaccggatcagtactgccggtctcggtataaaccgcgttgccgttatcccacgagaagttcctagtcttgtacagcttccattcggaaccggccagcagcttgctggtgtcagtctcgtcggttttcttccagttcaccgtaccggtaagacgcgagttctcaatgttgcccgcgctaggaagaccggaactcgtgacttgcccattctcaataacgatggtgtaagtcttcgtcttactgacatcgaaaccgttcggggcgctggtttccttcagcgtgtaggtgccatccgtaaggtcggacaccttgaactggccgcccttcggatcctcatcctgccgcgtgtcagctgccttggcagtcgtattggtaatagcgcggaccaccggctggtcatagaacaccgcgttcttcaccgtggaacgatgggagcgattctccacatatgcgctggtcaccgtgcagccggaaggtgcgctgtaatacacgttagtgttgctttccagcgtcaccacgtctccaccgttgaacgagtatccgccatcggtattcgggcgatagaaggattgaggagtggtccagttagccttatccctgcgaattcggaagatggcatcagatggcatcaccgaattgatggtgtaggagacgtattcgccacacccacttgcggtggtcatttgctttcggttcggttgatcgcccttgtctgcaggccaacttccattggcgtacttccattccagaaatagcttctgaccgttattttggttgaagtcatcctgcatcttgaaatacacagtggtggtggtcgcagcaggctttgtcaccttaattttcagggtggctttcttctggctacgctgctcggtggcagtgatggtcacatagcctgaagtcgcgttcttagcggttaccgtaacagcagtaccggttgaggggcttacggaaacctcatccgtattgctcgaagaccagttcaccgtgttgccttcaggtgccacggtagccgtcagcgtcatggtcttaccttgttccaggctgattttctggccttcggtatagttaccgatgctcacggagctttccacggttacaccgtttaccgtaaccgggaacctcagagtcttgtcacctgctgtgaacacgatgttcgtagtgccgtcgctatacggctgcaactgcgcgccatcgctggcaatgcctgcaacggcagggctttcggacttccactgcaccttcgtggcgagctcgttgccgttctgatccacagcaacataagaaatgcttaccggagtggaattcgtgaagttccacgaactaacttcaactcccttgatcttgaccacgatgtttgcgatttcgctgtcggaatcatcatccgtaatagtccacgactggtcgggatcgcccttcttggtcaattcccaagtggaacccgcgagcaacgtgttctggtcttctgcgtcaaccttcgaccatgcgatggaagtgccggcactcacgttgacaatggcaccattgtacagctgcttggcggtgtcatcagtgatttcagtgccgtcggcatcgtacaccttgtcgatggttgaaacggtatccgtactgtcgtgcgtgacgatgcgatagatgttcgtgttcaacgcatactggctgctgccggtaccgctttccttcaggtagtatgtggccttctttgcgagactgcccaaagtgacgctaccgttattcgcatcatccgcatcattccagccgccatcggcaaccgtggtgatggggttcgtgccattcatggcattattcctcgtgccgtacacggtccacgaagtacccttcagcgtcttgccctcggcatcgaccttatcccacttgatcgcggcgcaggaggtggtcatctgcccgtaccaagacaggttatgccgttcctggtccatatccactgcagaggtggaatatttaccttcggcgttgacaaaattaccgttgtctgcggtaacaacattcttgttgtacatttcgaaatcgccggtagtccacacgcgaccattggtggagacatgcgactggaagttacctgcagcaccggaatcgttgcccactaccataacggaacccatccatgcggcagacggatcatcggttacgttgacgttgtaccagtcttccttatcaccatggttctggttcttgtaccagccggtattgatatgccccgaccccttaccgccaaggatggtaagagagttggtgttatagaagttccacatcagctggcttgcgcgcttgacatattcctgtccgtgcgcgttattgtagcggttcgtgcctgtcgaattcatcatgacgtagccgtcggagatatcaacgtcgttccatttgaactgccatccgttacggaactccacatcattgccattaccgttgatgttgatggcaaccgaagcattgtcggaaatgttcttgaagttgaacaccacgccggcatcaccaatgttgttcagcaacgacgcatccaaattgaacacctgcaactcgtttttgccgttgccagtcagcgtgatttccgtctgacgcgaattgctctgaatatcgaaccggtaaacgttgtctgtgtaagtgttgtagctgtacgaataacgagaacctgtgtaattatcctcattgcctttcgtaacagtgttgctggaggaaatcttcgcgagcttgccagacagcgtagtcacataattcttatattcggaatatgtgtaatccgaacccgtcgaggggttcttcactccggaaataacggtgttgctctgattccagttgactttgccgttgccgcccatgtcgtacacggaatactgttcaccgttctcccaagtgttgcggctttgcactgtggtctgattaccagcaatgttcgcgttaaagttatggtcattcgtctcgccggtagcgccattccccgctccggttccaagccagctggatccctgattagcgtcatccgtccagccctgagcaccaccgaaccaattcaactcggaattggtgctattgccgccaaccgaaagcacagtcgaaccgtccttcggacggaactgcgaaccaaaaccgacgatgccccaacgaaaaccacgcgaacgattgaatgagccatccttattccagatgttccaagcctgcttcattggatgaagcaaaagctttccgttcacagcggtcaagccttcggcctcaacagcgtaagaaccctcaggcgcattgttgttattggcagaagtaatgcccgacttcttgccacctacatacatgtcaccgccaacgaaagtagcgataccttcatcgttaccgctgccggaggtctgatcgcctaacggttctgtggtaggtgtgcagattgcgccgtcattgcgactttcgtcagctttggcattgtaggtggggaggagggaagttactgctacggtggccatcatggctaccgctatggcggcggcggtcagggagcgggtacgcgaaagcacgcgaccggttgccgatcgcgttcctgcatagtgtcgtggtgcgttgccgacaccattacgccattgcctcatcttgtcccctatccgcaaagtgttcacccttctgagtccctcaactcgagggttgatatcctttgcataatgccgttatcacttctgttttacgtatagcttctgcgctgctcccatctccggcaacacagccggaaacctctgttttccctttttctctgacctacggtttactatgataacctttgcagttatgaaaacaaaatgaaacagaaagaacccacaccccctcccccgatacgttttttcgtcccctctcacggggacaacgctttaaagcctgatattcaacggtttgtcaacgattgcaaaatcaaaaaacacatgctgatcattgaatgaaattcatcattcatcagcccccgattgacgtgtcatgaaacacatcactgcaaattgtttcattttttttcctgaaaacgtatgccacacaccgtgactacagtgggggtatcccttatcaatccaccccaggccatcacaatcagcccgtcggcattgacgggctgcggaagggtaatgagactcggctctcagcggccagtgccgtacacggaatcggtgccgcgtagtacgagctgggcgcgcacaatctcatgcgcgttctcaagcggcttgccttcgataagcttcatggccttttgtgcggccgcgcgacccatcgcatacggatcctggcgcatggtggtcaggttcacagtgtcggcgtacggcgaatcgtcgaagccgataatcgaatagtcactcggcgtgtggtggccgtaacgttccaaacgcaacaccagcggaatcgccatcatatccatctggcagcagatcgcgtccgggaactcgtccaacgcaagcagcgcggtcaacgccgagtcggcgaaggtcttgccacgcggcacagagacgacgcgccacttgaagtcatgggaggcccccatcgtcttgcaggcgcggatgaagccctgtcctcgcgcatcgatggaggaattaatggaatcgaccgcatcggagcacacgtacacgatattcttgtgccccagattgatcagatgctgggcggcggtgaacatgccgtcctcatcgtcgatggagatggtggcgtcgaagccgttttgcgtcggcgtattgatgccaataatcggtacgtggatgcgcttgagctgctggatttccttcggctccacgccgaacgatgtcacgaatactgcgtccacgttgcggcggaccggcagattcgtgaagaagtcgcggcggttttcggcggtgtcgacgtgctggaacagcgatacgtcatacccggcattatgcatgacggattcgattccagcgaacacttccgtattgaaccagctagtgatctcttcattcatcagcatcgccacacggtacgattgacccgatttcaacgatgtcgcggaacgtgagatgttgaaatcaagcttgtccgccgtttccagcaccttgcggcgcgtacgttcggacaccagttccggccgcgtgaacgcgcgcgataccgtggaaatcgacacacccgcggccttggccacctcgcgaatgcctgctctatccatctctcaacccctttgcggtttctgcatcataatcacaaacgttcccagccttggaaacactcgcttgagcggcgatgctctctcaatctgtttctatcatactgcgaacgttgtcaaaaatcacgccagtgttgcacaaatcgcacaaattatcaaaataaccgggtaaaccgcgtaaaaagcccatttcgtccactgatgcttatagcccagcttgccgttgtagtagtgcacgaacgccacgcccacgcccggcgcgatcatcatcacggcgccgaacaggccggctgtgaacatcatcgaattctcatactggcgcatcagagcgaaaatcagcacgaagccaagcgtcaccgaaccgatgctcatcatgtgctggcgtaggccgatacgcagcagcaggtcccacagcagaccaatcaccaccagtccgaccgacaacagcaccttcatggccttctgatagcgcgacgccacccagtcgagcgcggcaagcacaacaaacgcaacgaacaggccgaaaacgggattctgcgagcccaggtcgaaagccttatgcgatgtggcgaggtcgtacggcacctcgcacaccacggcgagaatgaacagctgcaggccgtacgcgacccggctgtgcgtttcacggaaaccctgcaccagcagccacgcgtagatcggaatggcgaaccaggacaccacttcgctcaggaccatcgccgtcagcgacgtcatattgttggtatcggagccgaagaacagcggcacgatggtggtgctgccggcggacaaggccaacgccaccgcgccgatgaccttaagttggaacaccgtcagtccgcgacgttttttcctgttgcggcgagcgccgccgaatccgatttggtcggtcgaatcggttcgagctccctgctcggcatagccttccatatgtcctcctattgcgatttttccgcgcgtcgcacgtggcacgtgcaccttacgcacgccttacgcacgtatgccttttacgacttgcgactttcccgcacgccacagcggcttcccgcacgtcccatgcgatttaagctcagcgcccaccgcgcgccttatgcgtccagcacgaatttcagcagcccgtcgtagtcggctccggtaaacgaacataccgcatgtgccgaaacgtccgggtcgtccgccggtgaaatttccgtgcggaagtatgccgcgtcgaggccggcggaattggcgccgatgatgtcgttgcgctcgtcgttgccgaccatgagcgcgtgcttggcggtgacgaattcacggtcgagcgccagcatgtacaggtcgcgtgcgggcttgcggattttctcttcactggagatgatcacgtcgtccagtatgctggcaaggccggtctcttccagttcggggcgtgtgtagcaggcttgcgcgttgctcagcagcgccacgaccatgccggcgtcctgcagttgttcgatcatgtcgagcgcgccggggtacagccggaacaggctggtgctgccttggcggaacgcccatgcggctttcagcgcggcctgcggtagcgcgagtttcttttccgcttcctcgctgcgattcatgagcagggaccggtagaccggcaggatgtcgaattcgtcccacccgttgcgaacgattgcacggtcggcttggtggaccatttcgcgggcttcgagcttttcgaactggtcgcgcatcacgtcgacggattcgtactgcgcgcccaattcggtcacgcaatcgtacagcgcctgccatgcggcctcgctctgctcatcggtacgaatgtcgatcagcgttccgtacaggtcgaaaaacaccacctcgtaccgcggattgcgcgctccgattcccactgtcgtatcctttctggttttcctgccccattgccgtatctgttacggcaaccgcagctttgcggtcgccgttttgtagcttccctactgagagtattactgcaaccgccagattgcaaacgtatgcggtggaacaatcaaataatcgccatcacctgcgctcacattgccttccaccggactgacggacgagccgagaccacaccagtatctccgtattccgccaatcggttccaaacccgttacggccacgtcaataacgccgacgtgtctgcctggattggcggccatcagataatcgccgacgcggaacacgagttcgtcgccttccgtatcgacgatattgcgattgccgtcgaaccactgtggatcagacttgcgcaatgcaatcaacttcgcgtaatactcaatcaaatcgcgcttctgccatgcacggttccaatcgagccagttaagctctttggcggaatcgtaagaatcagagctgccgaatttggtacgtgcgaactcctcgccggacagcatgaacgggatgccagcggaggtaagcgtgatacccacagccagcttgttggcgtccatcacgtcggtcagcgcggccgcaatctgcggaccgacaccggccagcccttccgccgagaaatcggcgtcatacatgacttttggcacatccacggtattttcgttaacaccttcggccacggtgctgcccaacgaaccagccgcaaagctcgcgcacaacttgtcccacagcgtgaggtcgtcgtgcgcggacacgtattgaatgacctggcctgccactccttccgaatgtttgccgcgacgccacgcgtccacggcctcacgcgcagccgctacgttctcgtgcatgccaccgttcacataacccgggcggtccgagaagaacacatggcccttgatggtgtctcgcgtggtgtcgcagaagtggccgatgcgactgtcaagcttcgacaggcctgacttgtcagccagcacggtgtcgctgggcagcggcgcggtggcgcccgcggaccacggttcgccgtacatgagaatgtcgcgtccacggccgggaatctcatccagagcagcacgcacggcattcatggtgtccacgtcgatcagacccatcaggtcgaaacggaagccgtccatgtggtattcgcgcgcccagaacgtcacggattccacgatgaaccggcggaacatcttgcgttcggtggccatatcgcagccgcagccggatccgttggccagcgcgccgttgggcttacggcgcaggaaatagtccggcaccgaccgctcaaaccaattatcgggcgagaacatgtggttgtagaccacgtccatgatcactttgatgccggcgttgtgcagcgcctgcaccatctgcttcacttcgcggatgcgcaccgacccgtcgaacggattggtggaatacgagccttccggcacgttgtaattgaccggatcgtacccccagttgtagcgatcgcaggtctcttcgtccacggaaccgaaatcgtaaatcggcatgagctgcaccgcggtgacgccaagtttcttgagatatgcgatgcccgtgggaaagtcgggatgcccgtccagagacgtaccgtcgtcggtgaacgccagatacttgccccgatgcgattcggggaaaccgccggcgggatcattgctgaaatcgcccacatgggtttcccagaccaccgtctgcgcaagcggcacgtccggcatatggtcgcggtaccaaccatccggattggtgcggctgaagtccacgaccatgctgcgccggccgttcacaccggccccgcgcgcccacgggtcggcgatgcggtcgacggaaccgcaatcgcgttcgatcaaaaagtcgtaatacacgccgtgcatgttgtcggcgaaatcgtacgtccaggaaccatcggattccggacgcatcgtgtactgtccaatcagagcgtcgccgctttcccccatggagccacgcgagaacagtctcagggtcaccttctgtgcggaaggagcccagagagcgaactgggtgccggattgagcaaccacggcacccagaggccgttccaaacaaagcgggaacggttcggcgacgctcgtgttcggctgtgcaaagttgtctacgagcgtcattattgcgttacctttccgtcagcccttcacggagcccgacatggactcctgatagaagcgctgcatcacaatgaacaggatggcgatcggaacggagatcacgaccgcggccgcggcgaagcgggcaaaccagttctggatatattccttctgcagcatgagccacaggcccaatgccacggtgtagttggattgcgtacggcagatcaccttggccatgacaaagtcgagccacggggtcaggaagccgatgatggcctggtagacgatcatgggcttgcagatcgggatgatgatcttatggaacacctggaaacgggtgcaaccgtcgagcagggcggcttcgtccagcgaggtcggaatggtgtccatatagcccttcatcacgtagaagccagcgccggaaccggcggagtacacgagaatcaacgccacggtagtcatggtgccgcttgacaggcccaaggccttcaagatgaagtagatggcggtgacggccatgatacccgggaacatgccaagaatcagcacaacgttcatgaaagtcttgcgcacacggaaacgcatacggctcatgcagtatgccacagagagcacgaagatcagagaaatcgcacaggtgaagcaggcgatgatgaacgtggtgccgaacatcttcgggaagtccaacacgttgcggtcggtgaacagcaccctatagttgtccagagtccactccttcgggaagaaggagctggtgtacggggcggtgttcttattgaacgactccgcgaacacccatacgattgggacgagccagatgacggccagaatggccaggaacaagtgggcgaacacgtcgccggtgatacggcggatcttctggtcgtgcagaaggccgtggctttccactttggttgcggaatgcttgttgctcatcggaatgcctcctcattcttataggagccggaattgcggtaggtgatcagcgaaacgatggccaacacgacgaaggtcatgatgccgatcacggcaccgagattgtaatcctgcttgtccacggtcagcttgtacagccaggtgataagcaaatcagtggagcctgcggaatcgcccaatggcgtaggatcgccgccggacagcaggtaaatgacgttgaagttgttcacattgcccgtgaaggtggtgatcagatacggggtgagcacgaagataatgtacggcatggtgatcttagtaaagatctgccaccagttggcaccgtcgatcttcgccgcctcatactgatcggccggaatgttctgcagaataccggtgatctgcatgatggtgtacgggataccgacccacaggttgatgatgatcacggtgacgcgggcccaagtggcgttggtgaagaacggcaacgggccgtcaatccaaccccacgtctgcagcatgcggttcaccgcaccctgcggctggagcatggtgtgcatgaccagcagagacacgaactgcggaacggcgatggacatggagaagcaggcacgccagaaacccttgaagtgggtggtcttgcgattgatgatcatagccacgaacatgccgaggaagaagttcaggaaggtggcgaagaaagcccagaccaatgtccacaccagcacacgtccgaacagtacggcgttaacggtgccgccgctgttggagaaaaccttggcgaagttctcaaagccgacccagtggaacagcacgaggtgcttgtggtcatagctggtgaatgccattgaaatcatgaagatcaacggcagcacggtgaacacgacgatgcccagcgtgggcaggaacatcagcagaacgtgcgccttggcatcgagcagctcgcggacatcgtccatgaagctcggagccttgccgttctcctcgagcagcacctgggacttgtatgcagagcgcacggacatgacccacaggccgatgaaggcagcggtgataaccagagtggcgacaccgtacaacaggatgaccacggaacggtcaggttcggtgtagacccagaagccgtcgaccagcttcttgccgcctgcattggtgcccaaggtcggcaacttggaaagatagtccacaccattgattgccatgaacacgaagtatgcgatttccagcgccagcatggcaatgcccttgacatactgcttgcgcacgatatcgccaagaccaaacaccactgcggaaagcttagtgaacaggtcaccacgccggaacgccgcccttaccgtgtaaggcgacggagaaacataatcagcaccctgcttccgaaggcgcttcatctcccgtggggaaagagttgttgctgtcatttcgactgccctctcatatggatattgaaagataaaaaaagctttgctcccggacaaggggaaggagaatttaaaaaccttgcccgggaatgcaaagctcggaggaggagtgagccactatgcaaagtggagagagacaccgcgactcgaagcatctctcaaagctgcaggatggctggggggatttggcagtgccaaccacctgcattcttcagttattggatttttaggattactgatttcactcagcgatcttgccaccggcctgcttgacccaatcctggtacttggcggcagcgttgtccttggtgatttccttgttgaccagggccttgccgaaggtttcggccggagtccaccaatcgttcatgccggacagaccggactgcaggagggcggtgttggccatggtgtcggcctgggccttggctgcgacgtcgtcggtggtcaggtcggacagggacttgtcggtcggcgggatggcgcgcatctcgtagtgcagcttctgagcttcggtggagccgaggtaagccgcgaactgagcggcggccttcgggttcttggcgttcgggttgtaagcagcggccttggtggcggcgaaggacttcatctgcttcttctggccgttcacggtgaaggtcggcagagaggtggcggcgtagttgtcacccagggcctccttcacgtccttagcggaccaggtaccggagaacagcacgtcggcggagccatccttgatggctgcgaggccggaagcgccatcgtcgttggagaagttcgggttggcgaccacatcaaccagataagaggtgatatcggcgccgtccttcgggaagaccatgcctgcgtcagcatcattgcccttctcgccgaacaggctcaggccatcatagaagccgttgatgtaccaagaattctgcagggagaacgcgaccttggccttggaaaggatggtatcgaagtccttggcctcatcctcggtgatcttggacttgttgtagtacatgaaccacgtgttgtcggtgtacggcacgccatagagcttgccatcggtgccggtgacggagttgacttcgaggtcgccgttctgttccttcacctgcttctcagcgtcggtgcccagctggccaatggccttggcgtccattagaacacccaactgatcggaagcgaacatatagacatcggccgccgcggacggatcagtgctgacctgcttggaagcatcgccttcggagaccacgtcattcttccacgtgatattgtattccggatgcgccttggcgaagttctcttcgaccttgcccagccagttggtgtccttggcctggtcttcctgcggggcccacacgctcagcgtgacggcctcggtggagccggaagcgttcttatcgccaccgtcggaggagccaccgcacgcagcgagcggaaccagcatagaaacggcagcagtaagtccgattgccttcttccaatcgatcttcattgatcttcctttcctcacataaccttgtgttcctcaacatctccggttaaatggtacggaccaaaaccctgcatacgttcacatcatcgttcttggatgattaccaacaacactggggccaccaaaaatgtatcagtgattgttagtgtagcacgtttctgccaacgtttgcaattcagcgttatgattgtttcaaagaaacaccgcaaaccgcgaaatatcaaggagacacaccctcatgcttccccccgcgaaacacccccaccccaaatggcttgccgacgcaattttttatgaaatctatccacagtccttcgtcgactccaatggcgacggcatcggagacatccccggaatcactttaaaactggactacatcaaggatctcggatgcaacgcgatctggctcaatccctgtttcgactcgccattcaaagacgccggctacgacgtgcgcgactacaaaaaggtggcatcacgctacggcaccaacgacgatctcattgcgttgttcgacgccgcccaccggcgcgacatgcacgtgatcctcgatctcgtgccaggccacaccagcgaggaacacgagtggttccaccgcagttgcaaggtcgaacgaaacaattattccgaccgctacatctggacagactcatggatctccggtggcgacggactgccattcatcggcggcgaatcgccccgcaacggtacctacatcttgaacttcttcaaatgccagccggcgctcaactacggtttcgcgcaccccgaacgtagctggcagaagccagcccttggtccggacgcgaaggccacttgcgacgcgatggtggacgtcatgcggttctggctttcccgtggcgcagacggcttccgcgtggatatggccgacagcctcgtcaaaaaggacgatgagggcaagccttacaccatccgcacctggcagtacatgttcgcccggatccgcccggccttccccgaagccgcgttcgtttcggaatggggacggccagaggagtcgatggccgccggcttcgacatggatttctatctcgattggcgttgggacggcgttcccaacggctacaacatgctgttgcgcaacgtggacgacccgttgagccgcaagggcgacaagagctatttcaacgccgattccggcacgccgatcagcaaattcctggacgagtacgagccgcgtctgcgcgaagcggaaacggccgacggaaattttaatttcatcacctgcaaccacgacaccgcacgcgtggcgccgcgactgtcgcagcgcgaaatcgccctggcatactgcacgctgttcgcgatgccgggcgtgccgttcctgtattacggcgacgaaatcggcatgcgataccgcgcactgcccggcaaagaaggcggctacgtgcgcaccggttcgcgcacaccgatgcagtggggtgcgaacgacgcatccggagcacttcacgtgtccgattctgcagaatcggacactcgggctggcgatgtgaccggtggcagctacctgcccgccgacccgtccgccgacgccccgaccgtcgccgcacagcaggccgacgccgaatcactgtggcatacggtgcgctccatactccacgtcaagggggaatgcgacgccttgcggtcgggggctacgttccatgcaatcgaacgcgatagagtgttcgttttcgagcgttccacccacctgcagaagctgatcatagccgtcaatccaagccgcgattgcaaagctttgcagctaccagatggtagttatcggacgattttcagcatcggcgaaaacgaaattagcggcacttcgctgcgtctaggtctgcaaagctttgcaattctcgaagccgagtagcagacgagcaatgccccgttggaataatcgtttgcaatgcggagcgctgcgccttcgtattgcaaacgatagtcaatatggaaaaacaattccggttatctatattcctgaaattagagcaaaatcgcaatatagcaacactctcttaccgcaaaacacgctttgaaaacgatatcataccgtgatatagttatctttggtgcgaatgccaccagcatcgaagctgcggcaatcgcaagcaatgtagcatgtcagccgtcacaaacggcgcggaaagaagggacctatgacacagacccagcagaccgaaagcgcagaacgcatcgcacggcctcttatccagctcgccaagctcaatggcatttccacgtcgtatatcgaccagctcggcacctatgtggaaatccgcgacgaagtgctcgtctccgtattggccgcactcggcgtggacgcatccagcgacgaagcgatcaccgcctcctatgcggcgacccagcagcgcatcgcagacacacttgttgagccgaccgtcgtgaagttcatcggcaaggaagccgtcacgccaatccgcgcgaaaggaaacgacgtggcgctgaagctgacgttggaagacggcacggaatatgcgggcgatctgaccgcgtatctgacgggctcgaacgcagatgacggctcgctgcaactgacgctgccggacgatattcccgccggctaccacacgctggccgtcgatgccggcccgctgcacgccgaagccgcgctgatctgcgcaccggcacgcatcgaactgccgccagcagtagcggaaaagcaacgttggggctggatggcacagatgtattccatccgttccgctgaatcctggggcgtgggcgactatggcgatctgaagctgctgctgtccgacgcggcaacgaaatcgcatgccgatttcatgcttatcaacccgattcacgccaccgcgccggtgccgccgctggagccgtcgccgtatcttcccgaatcgcgtcgttttctcaatgtgacgtacatccgtccgcaggatatcgctgaatatgcggaactcaacgaggcggaccaggccgaagtggcgcgtctgcacgcggaagcctcgccagccaacgacagtatcgagccgctcgacatcaattccgcttggtggcacaagcgccaggcgctgcagcttgtgtacaacgtgccgcgttccgtcgagcgtcaggccgcgttcgacgcgttcaaggaggccgcgggtccggatctgcgcgcgttcgccgcatggtcggtggcgttccaggtgtggggcgcgccgtgggaaggcacgtggttcaaggacacgaaccgcgattcgcctgaagtggtggagctcatgcgcgagcacgccgatatggtcgatttcgaatgctggctgcagtggatcgccgacgagcaggtgacagccgcgcagaacgccgcccgtgacagcggtatggcactcggcctcatgcaggatatggccgtgggcgtgcactcgctcggcgcggacgtgtggtggaatccggaacgtttcgcagtaggcagcgtaaccgtgggctgcccaccggacttctacaaccagcagggtcaggattggggccagccgccgttcaatccgaattatctggccaaaactggttatggcgtgtaccgcgagatggtgcacaacatgttctcgcacgcgggcgcggtgcgcatcgaccatgtactcggcctattccgtctgtggtggattccgcagggcgaaggcgcgcgcggtggcgcgtacgttacgtacgactatgaggcgatgatcgcgatcctgaccattgaagcgtcccgcgtgaacggtttggtggtcggcgaggatctgggcaccgtgcctgattacgtacgcacggtactcggcgagcacggcctgctgggctgcatggtggaatggttcgcccgcgtggacgactcccccaacgccggcgacccgtacgccgatccgtccacgtaccgcaagtacgcgctggcttccgtcaccacgcacgacctgccgccgaccgccggctacctgcagttcgagcacgtcaagctgcgcgaacagctgcacctgctgtccggcccggtcgaggagttccaggcttccgccaccgccgaacgcgacgcgatgatggaccgtctcgtggagtccggcctgatcacgccggaagtggcgggcgatgtggaaggccacatccaggaaatcgtcgaggcgatgcacaagatgctactcaagtcgccgtccgtgctgctgcaggccgcgctggtggatggcgtgggcgagacgcgcacgcagaaccagccgggcacgtccagtgaatactccaactggcgtgtgccgctggcaggcccggacctcaaggtggtgcacaccgatgaggtgttcgatctgccgcgcgtgcaatcgcttgccgccatcatgaacggcgagaagtagcgtttagacttaccattcccctttccttacaaaccaaaattccggtcctccttgtggagggccggaatttttcatatacgcaaggcgatttgggagcggccaggttcagcggtcgatcagcccagcagcagccagactgaggcgtcgctatccagcttgccgtcatccgtcaacggcacggaatttgcgatggcgaccgcatcgtccggcagggcgatcggctcgtcgccgaaattggtgacggacaggaatcgacggccttccgtggccggacgcgagtaggcgaccaccgtatcgcccatgtccagcaggtcggcggacgtgtctccggtcgccgtcagcaccgtctgtcgcaactgcaacagcttgcggtacaagtgcagcatggaaccgttgtcatcggcctcgacgtcggccgcgaaatccttgaaccaggccggctgcggcaggtgcgcgtcggcggaatcgccctgctccgggccgaaaccgaacgtgccgccggtgatgaagtccgggctccacgaagccggttcgccgcaatcggcagccttccacggcatcggtgcacggcagccgtcacgacccttgtcggtgaagttgcgacgggtgttgaacggcgtcggatcctcaagacgatcccacggaatgttcgccacttcgaacaggcccagttcctcgccctgatacacgtaggcggaacccggcaggcccagttccatcagcgcggctgcgcgggcgcgacgggtgccgagctcacgattctcgcggtaggtctctccgtcacgcaacagccaatcgtgcgccagctggtggtacggagcgtccttcacctgcggcagaccgaaacgcgacggactgcgcggcacatcgtggttgttcataacccacgtcgtggtggaaccgtgcgtttcctcggcggcgcgcaagccgtcagcaatggccgtacggaactcgtcggcgaaccagttggcttcggcgaactcgaaattgaacacctggccaagctcgtcggtggacgcgtacagatgctgcgattcggccttcacccacgcctcgccgacggcgaaacgcggcggattgtactcgttgaacacctgacgccattcgcggtagatgtcgtgcacttccggacggtcccacagcgggctgaacgcgccgtccgccggcagcacatgctgcaccgcggccggatccatgtcggccagcggcacggaatcgaggtccttggccaagccgtgcgccacgtcgatgcggaagccgtcggtgccgtggtcggaccagaatctcaacgttttcttgaattcctcgtgcacgtccggattcttccaattcagatccggctgctccttggcgaacatgtgcaggtaccactgtccgtcatcgacctgctgccacgccgggccgccgaacagcgactgccagtcgttcggcggcagctcgccgtgctcgccgcggccttcgcggaagatgtagcggtcgcgtgcggccgaacctcggccggcggcgagcgcctcgatgaacatcttgtgcttgttggacgtgtggttcggcacgatgtcgacgatcaccttgatgccggcttcatgcgcggcggcggccatcgcgtcgaaatcggccatggtgccgaggcgcgggtccacgttgcggtagtcgatcacgtcgtagccgccgtcggccaggtcggacgggtagaacgggctcagccagatcgcgtcgatgccgagattcttcaggtaatccattttctcggtgacgccggcgatgtctcccaacccgtcgccgttcacgtctttgaagctgcgcgggtagatctggtagacgacggcttgcttccaccaatcgtcacgcatgttgtttgctgtcaccataaccccttttgtcgtagtccatcggatgcggagcactgtctccgctacatgaaaacgataacatcaagcaaagcgaaacgctaatgaaaacttaatcattgcagcacatcaaacgtttgacgaaaatgtgcatactccagctgtatcgagtagaatcgcaagaagatccgacttgcatacgttgctatacggatgccatacgaaaggcgattatgaagttcctctcccccgattccggctttatgcgcggcctgagcgacgccgtcgacgcgatctggatcaacattctgatgctcgtcaccagtattccgatcattacgatcggcgcggcgctgaccgccggccacgacgccacccgccgcacgctgtccggcgaaggcacggcgacgcgcaactatttcgccgccttccgctcgaatttcgcgaaatcgaccggctactggctgattttcggcacgaccggcgcgctgtgcgtctactcgtggatcgtgctgcagatcacgccgctgctgattccgaaattcgcgctgacgatcgtatggctgatcggtttcgaatgggtgtgggcgttgcaggcgcggttcgagaactcgttttggcgcacgctcggcaacgcttttgtgttcggcgtgagcaacatcgggcatacgttggcattgattgcgattgacgcggtgtacgtcgcgctgctcgtggccagctggttctacatgccgcagggcctgttcctgctgctcgtgctcggctacggcaccatgctgatgctgcattcgccgattctcgagcatgtcttccgcaagtacatcagcaagtaattaggcacgaaaaaagggactgattcgcatcagtcccttaaatttttctgggtgaaaatcagcccttcaccgcgccgccttcggccctgcaattaaggaccgcgctacgcgcgggctcaacgttaccctcgcggcatagccgctcgggctggagcctgggaacagcgcactgcgctgttccctaagggctgatcgaagatcagcccttaacggctccagccataacacccttgacgatgtacttctggcagatcaggtagaagatgatgatcgggatgatggccatgaccaggcatgccatcatggcgcccatatccacggaaccataaccgcccttcagatactgcaccgccacggaaatggtcttgtacttgcccaggtcgagcgtcaggtacggcagcaggtagtcgttccagatccacatggcctgcagaatagccacggacacaatggacggcttcatgatcggcacaacgatctggaagaagatacgcggcacggaagcaccatcgatcatggcggattcttccagcgattccggaatgcccttaaccacaccggtgaagatgaacacggccagaccagcgccgaagcccagatacacgaagcacagaccccacggggtgttgagcttgagcatatcggccagcttggagagggtgaacatgaccatctggaacggtacaatcatgttgaacaggaacaacgtgtacagcagctttgcagcccagttgttcacgcggacgatccaccatgcgcacatcgaagtgcacaccagaatcagcgccacggaaccgacagtgatgagcagggtccagccgaaactggcgaagaagttcgtggtatcgaggccacgcgtatagttttcaagtccaacgaacgccttaccggtcggcagggagaacgcgttacgagaaatatacgccttctgcttgaaagagttgatgatcaccagcacgatcgggaagatccacgccagcgaaaccaccgcgaacagtacggaccacagtgcgccgtgcttgactttttctccggagttcatgcctccacctccttgctcgtggtgagcttgttctggatgagcgccacgatggccaccagaatgaagaacagcactgccttcgcttggccgatgccttcccagcccatacggccgtagaacgtgcgggtaatgttcattgccagaccttcagacatgttcgacggagcgccgttggtcaatgcaaggttctgatcgtacagcttgaagccgttggtgacgcacaggaacgagcatacggtgatagacggcatcatcagcggaatgatgatcttgaacatggtctgggtgccgtttgcgccgtccacggaagccgcttcgagcacgtcggtcggcagcgactgcataccagcgatgtagataatcatcatatagccgatctgctgccagcaaaccaagatgaccaagccccagaagccgtaggttgcgctatacgtcaacgcgcggccccagtgagcgagaatgccgttgagcagcagcatccagatgtagcccaggataatgccaccgatgaggttcggcatgaagaacaccgaacggaagatggtagatccttgatggccttggtaagcatatatgcgatggcaaacgcaaccacattgatcacaaccgtagtgacaatggtcagcgccgtcgagaaacctaacgcatgcaggaattccttatccgcaagtgccttctgatagtttttaagtccaatgaattccgagtcagtcacagttgtgaacttgcagaaactcaaatacacacccatgatgaacgggattacaaacccgatgataaatgcagcgaacgtcggtagcgcaaacagagcccaccactttcgtatcgctttgccggccatgctgatcatagcttgcctgctttctttcctctccattccaacaccgcagcaacgcggcatggaaaaccaactgccccaaatcggcgaatcactgcattgtttttcgcctttttagtttttacagttgttataataaacagcgcgacgcgaaatgtcaaacgttgtcatttttacatgtcataaatcatatattctgcatcgttgtcatagtattgacagcctgaaagcattgtaaatatcagccccgcaacaactgtggcacaaatgaaaacgtttgtaatccaacttttgcaagagtgtttcaatacagtatgctgaatattcagtagttctactatacaaggggtcaccatgaaaagcagcattcaagacgtggcacaacttgcgcacgtctccatttcaacggtttctcgctccttcacacgtcccgaccttgtgtcgaaagccacgcgtgacaaagtcatgaaagctgccgacgaattaaatttttccatctcgcgctccgctgcagcactcaaaaccggccgcgcgctacgaatcgcggtgctgatttccgggcgactcaatctgtggttcagttcgtccatcatggaaggactgaacgaatccttccatgatgaaggctacgacatctcgatctatcagatgtccagcgccgaggaacgccgcgcgttcttcgacatgctgccggtacgccgcaatgtcgacgccgtaatcgtcatttccttcgacatcgacagcaacgaaatcaggcaactcaggtcagtcgatgtgccaatcatcggcatcaattcgagcttgccggaagagcgcggcttcaacgccgccgtccgcatcgacgacaagcagggttcggaactcgccgcacgccatctgatgatgcttggccaccgcgacatcgtctacatccgttccgaccgcgaagtgacgctgcacttcagcgtgcagggccgttacgaatcgttcatggcatgctgccaggccaacggcgtcgaaccgcgcgtgcttgtcaccgacgctggcaggaacaggatcagcaaggtcgtgacgcagctgctcagcctcgaccacatgccgacggccatcgcctgccaggaggatggcatcgcggtgccgctgctgttccagctggaacgcaacggtttcaccgtgccgaacgacatctccatcatcggttacgacgacagcgtctacgcgcgcgacctcggcctgaccaccatccgtcagacccctgtcgagatggcccgcgaagcggcccgcatgacactcgcgctaatcgagaagcagccgctcgacgaaccgttcaagacgttccccgcgcagctgatcgtccgttcgaccaccgctcgtctgcatagctgattttccggcaacatacagcgaacgtagcgacatacacgaagggccgtcatcgcaagtaattacgatgacggcccttcgtgtatgtcgtcacaaccaactgcggccgagagaaggaaaggaaaaactctcggccgcagttgttctattcggttattggtttgatcaagcggtgatcagtgaacagcgtcgtactcggtcttccaaccgtccacgaacgccttcttgactgcgttccagtcgccggtgccctgagcgtattcgaggagggcggaaccaagcttgttcttccactcttcggacggcatcatggtgaagttccaagagactgcggtcttgccggagttctgatcatcaacagcggcctggaccagcggattgtcggacttgacgtcgctgaaggacttgaacggggtggtgaagcccatgtcgctggacagagacttgatgccagtcttgctggtgacgacccacttcaggaagtccttggtggccttcttatccgcgtcagaagccttggagttgatgcaccagtagttctcggaaccggtggccagaccctgcttctcttcgcccttgacgccgatgtaaatcgggagcatgccgagggagtcggccttcatgccagccttctgcagatcggtccatgcccaagtgccgttctgatagaacacagcctcgccgagggagaactcggaggtagaatcatcaccggtcttggagctcagctgggtcggctcggtggtggagtccttcagatacaaatcgaagatgttcttatattccggcagataggtgcccttgatggtctccggctgcttggtgacgttgtcatccttgaactcatagtaaagcggcaggttagccaaatgggtcttgaaacgccagtcggagctggaatcgaaaccggcggaggtgaacgcgcccttgacaccaagctggtccttcttagcctggatgtcatcggccacggccttcaaggtatcgaagttgtcgatgtcatcgacgctcttgatcttggcgccgtcagtggcaatgtacttggccagcagatccttgttgtagatcaggccataagtctccatggcatacggaacaccgacgaccttatccccatccttgagggcgacatccttgttgataagctgcttgtacggctcagtatcggacatgtcttcggtgtaggacgaccagttctggtagccgacagggccgttgacctggaacaaggtcggagcctcggacttggcgatctcggacttcaaagtctgttcgtatgtaccggaagcagcggtctggaccttgacctcaacaccagtttccttggtgtaatccttggccagcttcttccattcgtcgctggattccggcttgaagttaaggaagtacaccttgcccttgccgttatcggaacttgagctagaaccaccgcaagcagccaacgtgccaacagacattgccgcgatagcgaccattccaactgctgccttaatagtacgattcatcatcgaacctttctcttccattcctgttcccagcttctcgttgggaaacaatttgcggtatcgcgtcatcacgattcctaacaaccactattgtgccgcatttccccgatttttgcaaacgtaggcaaaatgaattcaaaagtcagacgtcataccatcgaaagaaatcccgaaaatcatttattttcaatacttttagagagcatacttttatgcaagcgtttgcgacacgccgcagcaaagtggcaagtcatgcatgcaataaagaggcggttccaaggagggaccgccataatattcagcgatatcaaacagttccgttcaataattcagcaattccaatgttcgatgacattgtcacctttatattggcttaatacacaataatgcgcagtgtccaatcgcagcaaccgcgcgaaatgcggatcaacaccgagccattgcgacgtcaagatacgaagaacgtgcgcatgcgccaccagcagcacatcgtttccagcgtcgagcaacggtttgaccgtggcgatcgcctcacgtgtgcgcgccgcagcttcctctaccgtctcacccggaccgttgtgcacgggcacctgctcgccgttcggcaacgtctcgacccaatcgccctccagtgattcggggagcgaccgcggtccgtcgcgccacacatcccaagcgaaaccgcccgccgcgctcacatcctgacgcgtacggccctcggcacggccgtaatcccattccgcgatttcgggaagcaccttaaaatcgccatatccggccagctgcgccgtctgctgggctctgcgcaacggactggcgaacatgcacccctgcgcgaaaccctggggaaacgcctcacgcaaccgttcgccggcggcacgagcctgatcgcagccaatgtcagtcaacggaatattggtgcggccggtgtgctgtccggattcgctccacacggtctgcccgtgacgcagcagcaccaagcggccaggggtgattgcggaagcggcattgcctcccagttgagtttcagtcatgtctctactctagccgacgcaagctgcgttttcatcccattccgccacgtgtcccgcacatattccggcatgttttccgacgcgttacactggtttcatgagtgaaatgccgaatatggaatccagtgcggaccgcgtggtggcggccctgcacaccgtcgacgagaaggtgaatgcgatgcgcgaccagagactgaacgatcccgattcatttggcgataagattttcaagtccgtcgtgcccacgttggccggactggtgctcggcaaggcgttcgagatggtgtggaagaaaagcgtcggccgcaaggccgtccgtgccgacggtaccaagaacgaggctgcggaagcggcgctcggcatcgtattcgccgtggtttccgccggtttcggcgcgctcgtatcgcaactgtccggccgcgggtcgaaggcgattgtggacaggcggcacgcacggcaggcgcatcgcaagtaaatacgtcgcaaatatcgcaaagcagtctcaagtagatatgttctcacagggagacggatttagcccgattcccttgcaaaatcgcgccgcgcggacaacaatggcggtatgagcaacattcttcataacgcaactgtcgacactctgctggagcgtcgttccatccgtaaattcaagccgaagccgctgccggacgacgtcgtcgaaacgttggagaccgtagcgcagcatgcggcgagcagccagttcctgaacgactggtccgctatccgcgtcaccgagccagccgccaagaagcgtcttgccgaaatcggcgggcagccgtatatcgcgaccgcgccgctgctgtacgtgttcgtgctggacgagcatcgcaatgccgcgatcgccgcgcgcaagggcgtggaagtggcgtccgacgcgttcacgctcaatggcagctatcgtttcacgcaggcgcagaacgacgcggttctggcactgcatgcgatggagacggccgcgtactcgctcggcttgggttgcgtgattctcggctcgctgctcaacgatgttcccgcgctgatcgacctgctgaatctgcccgaatacacgtacccggtgctgggcattgcgatcggcaagcccgatcaggagccggccgtcaagccgcgtatgccgcgttccatgcagttcttcgagaacgagtatccaagtagcgatgagaagctgctgtccggcttggattcgttcgacgccgaagtgcacaagtattacgatttgcgcgataccgaacggccggtggacacgttcagcgaccagattgcggcaaatgcgattgacgagggcgtgaatgccaaggccgttgccgtgcaggcgaagcgacagggcttccgtttggagcggtagaccgtatacacgtatctttgaggttgatacagcaaggcccggtggattgcaatgaatccgccgggccttggttttatatgttgccttattctcggtattgtcctgttatgccctgctattgctctgctattaccttctgcggggcttgtagcccttcttgcgggaatgtggcttgagctgctggttaagcggaacatgcatgtagctggattgtggatcgcgatgcgtgagatgccaagtaccgcagaaatcgcaacggtatacccaaagctcagtgccgcgttcgcgccaactctggtcggcggcctgctgagccgttgccttgtcgtgatacatgatcttgttcgactcggtgcaacgtttgggtacgaagtaatgcatagttgcccagtctataaacccattgcgataaaacgcttgcgccctacttgtgttcagggataaaaaaatggggttcccggagcaggatgctcgacgggaacccccaacgtttgaagcggcggcgtgctactctcccacaccctctcgagtgcagtaccatcgccgcgcctggccttagctaccgggttcggaatgggaccgggcgtctcaccagggctatgaccaccgcaaatctaatggccacggcaaggaaaccaaaggaatccaaaccggcatgttatcggtggcggtttgggaaccggctagcggacgcgaggcaaacgcctatcgtttgaatcgtattcgtgaccaccaagcgctcattgtcgcctgggaccgaagcacaggaaagacgcggaaccaacccatgaaaggattggaattgttgtgtcgccgtcgcccgttagtaccggtcggctccacccctcacggggcttccacctccggcctatcaaacacgtgttcaacatgcgggctacaggatctcgaagatccatggaatcctaatcttggagcaggcttcccgcttagatgctttcagcggttatccctcccgaacgtagccaaccggccgtgccgctggcgcgacaaccggcataccagaggttcgtccacccaggtcctctcgtactatgggcaggcctcctcaggattccaacgagcgcagaggatagagaccaaactgtctcacgacgttctgaacccagctcgcgtgccgctttaatcggcgaacagccgaacccttgggacctgctccagccccaggatgcgacgagccgacatcgaggtgccaaaccatcccgtcgatatggactcttgggaatgatcagcctgttatccccggggtaccttttatccgttgagcgatgccgcgcccgtgcgccggcaccggatcactatctccgactttcgtccctgctcggaccgtcgtcctcgcagtcaagcccgcttgtgcgattacactcgacacccgattgccaaccgggctgagcggacctttgagcgcctccgttactctttgggaggcaaccgccccagttgaactacccgccaggcactgtccctgacaaggatgacttgtcgaggttagacgtcaaacgagaacagagcggtatttcaccttgcggctccacatgagctggcgcccacgcttcgaagcctcccgcctatgctacacaatccgcgcctaacgccaataccaaggtatagtaaaggtcccggggtcttttcgtccttctgcgcttaacgagcatctttactcgtactgcaatttcgccgagctcctggtcgagacagtggggaagtcgttacgccattcgtgcaggtcggaacttacccgacaaggaatttcgctaccttaggatggttatagttaccaccgccgtttaccggggcttgaattcaccgcttcgtccccgaagggattgacggatcctcttaaccttccggcaccgggcaggcgtcagtgcatatacagcggctttcgccttcgcatgcacctgtgtttttggtaaacagtcgctaccccctggtctgtgccacccaccaaagctccccgggctagccggttcaccccagcgggtctcccttataccgaaggcacgggagtgatttgccgagttccttgaccaggattcgctcgatcgccttggtattctctacctgaccaccagtgtcggtttggggtacgggcggccatggccctcacgccgaggcttttctcgacggcctggacaaccggatatcgagccataacggctcccatcatcacacctcgccatgcgcgccatgcggatttgcctacatgactggctgcgtgcttgaccacggaaaaccacctccgcggccggctcccattccgtgtcacccctgcgctgacctactgcggctacggtcccaacgccacgcggcgacaccaacccgaaggaaggaaccaccacgaggcggaggttagtactcaccgtctcggttttgccggtccatggtcggtacgggaatatccacccgttcatccattcgactacgcctgtcggcctcgccttaggacccgactcacccggggacgacgaacgtggccccggaacccttggtcatccagcggacgggatcctcacccgtctctcgctactcatgtctgcattctcactcccacgaagtccacggccggtttccaccgccgcttcgcccctcgcaggacgctctcctacccagcaaccatgaagattgctgccgcgtcttcggtggtgtgcttgagccccgctacattgtcggcgcggaaccactagaccagtgagctgttacgcactctttcaaggatggctgcttctgagccaacctcctggctgtctatgcgactccacatcctttcccacttagcacacgcttcgggaccttagacgacggtctgggctgtctccctctcgacgacggagcttatcccccgccgactcactgccggaatacacgtcaacggtattcggagttcggctgctgttggtacccaacaagggcccgcaagcatccggtagctctacccccgcgacgcaatcgaccgacgctgcacctaaatgcatttcggagagaaccagctatcacggaatttgattggcctttcacccctagccccaggtcatccccccggttttcaacccaggtgggttcggtcctccacgcggtcttacccgcgcttcaacctgcccagggctagatcatcccgcttcgggtccaggacaagcgactacaaacgccttttaagactcgctttcgctacgcatacgccacacggcttatgctcgccacccgccactgactcgcagactcatttttcgataggcacgccgtcaccccacaaggaggctccgacggtttgtgggcgcacggtttcaggaactgtttcactcccctcccggggtgcttttcacctttccctcacggtactggtacgctatcggtcagacaggtatgcttagacttacccaacggtctgggctgattcacgcgggattccacgaggcccgcgctacttgggacaacacgatcggaagacggctcacgtccaggtacggggctggcaccctctacggccaggccttcaagcctgttcccctggcaagccgttttatgactcccgcccggcccgtcggaaccgggacacgtgatcccacaacaccggcaacgcaacccccgacgggtatcacgcgcaaccggtttggtctgatccgctttcgctcgccactactcacggagtatcccttcctgcaggtactgagatgtttcacttccctgcgtaccccccgcccataggcggtgccggcccatgacggccggcgggttcccccattcggagaccctaggatcaaagccatgttggaggctcccctaggattatcgcatcctcaaacgtccttcatcggtactgtctgccaaggcatccaccatacgccctcgcaagcggcacaacagcaaaacaaattgtcattgccccacccgcgggtttcctgatagcaagatcgccagacgacaaatcttaacactaaaatgatcacaaaacgatcgatctcgaaaccaaactcaattgaagagtttggcgaaatcgcgataagcaaaaagaaacgttctttcagtttctcttgctcgcgtccactatccagttctcaaaccaccacgcgccacacgatccgaccagccacccaggaccggccaccacgcatgggcatcgaaccgcgccacagaaacaaacctgtggggtggcggtccgggagcccaaaagcatacccataccactcccggacatcccgacgggacatccaagcccatgatctcttccacaccagcatccacactataaggcatgactgtcacgccatcgtgtggcacacactgtccaaaaaacattggactgaattctccgtagaaaggaggtgatccagccgcaccttccggtacggctaccttgttacgacttagtcccaatcacgagtctcaccttagacggctccccccaaaaggttgggccaccggcttcgggtgctacccactttcatgacttgacgggcggtgtgtacaaggcccgggaacgcattcaccgcggcgttgctgatccgcgattactagcgactccgccttcatggagtcgggttgcagactccaatccgaactgagaccggttttaagggatccgctccccctcacgaggtcgcatcccgttgtaccggccattgtagcatgcgtgaagccctggacgtaaggggcatgatgatctgacgtcatccccaccttcctccgagttgaccccggcggtcccccgtgagttcccaccacgacgtgctggcaacacagggcgagggttgcgctcgttgcgggacttaacccaacatctcacgacacgagctgacgacgaccatgcaccacctgtgaacccgccccgaagggaggccccatctctggggctgtcgggaacatgtcaagcccaggtaaggttcttcgcgttgcatcgaattaatccgcatgctccgccgcttgtgcgggcccccgtcaatttctttgagttttagccttgcggccgtactccccaggcgggatgcttaacgcgttggctccgacacggagaccgtggaatggtccccacatccagcatccaccgtttacggcgtggactaccagggtatctaatcctgttcgctccccacgctttcgctcctcagcgtcagtgacggcccagagacctgccttcgccattggtgttcttcccgatatctacacattccaccgttacaccgggaattccagtctcccctaccgcactcaagcccgcccgtacccggcgcggatccaccgttaagcgatggactttcacaccggacgcgacgaaccgcctacgagccctttacgcccaataattccggataacgcttgcaccctacgtattaccgcggctgctggcacgtagttagccggtgcttattcgaaaggtacactcaccccgaagggcttgctcccagtcaaaagcggtttacaacccgaaggccgtcatcccgcacgcggcgtcgctgcatcaggcttgcgcccattgtgcaatattccccactgctgcctcccgtaggagtctgggccgtatctcagtcccaatgtggccggtcgccctctcaggccggctacccgtcgaagccatggtgggccgttaccccgccatcaagctgataggacgcgaccccatcccataccgatgaatctttcccgacacgacatgcgtcatgtcggagcatccggcattaccacccgtttccaggagctattccggtgtatggggcaggtcggtcacgcattactcacccgttcgccactctcacccaggagcaagctcctgggatcccgttcgacttgcatgtgttaagcacgccgccagcgttcatcctgagccagaatcgaaccctccacaaaaaaaccttttcatgaagagacatcgacacgatgactctcgaaataagaaaattgacgatcgccttataaggaaaggcgcatcgcacaaaaacctcaccgtccttcaaggcctcccggccactcgcaaggagcggacgatgaactggcaatcattgactataaagaagtagtacaaatacgctcttgagttctcaaaccaccaccactcacccacctcgcaatccggaaccatccggaccactcgctgagcggcagcaagggattaacttacacgaacccgtccacttgcgcaaatcggcattcctcaaaccccgtaaaaacccttgcggcgcaacgcattcatcggcgtgtcgaaaaccgcctatcgcacgccacatcatcgcagaaatgcttcagacaagcctcaaaacggcctgaaattcatcagaaaaacctgtctacgggcgtgtcgtgagcctgcaacggtttccaaatacggtcggaaagccgaaaaagacgcatacggaggaaaccgcgcggtggtatgtatggaggtatgagcaaaaaaatcgcagtattgacgggcgcaggcatctccacgtccgcaggcatccctgacttccgtggaccggacggcgtctggaccaaacatcccgagcaaatgaacgtgtacgacatcgacgcgttcctagccaataaggaagaccgcgagtattcctggcgctggcaaaaggaatcgccagtatggaacgcgcagccgggcaccgcacacaaagcgctcgtcaaattggaacaagcgggcatgctgaccttgctggccacgcagaatttcgacgcactccatgaaaaagcaggcaacagcagcaacgtcatcgtcaatctgcacggaaccatcggcacctcgcactgcatgaagtgccacgcgaaatacgacaccgccgaaatcatggcgaatctcgacaacgagccggatccgcactgtcatcgcaagctgccatacagcggcaatatgccatgcaatgggctgatcaaaaccgacgtcgtctactttggcgaagcgctgccggatggtgcgattgaaaagtcataccgtctggcggcgcaggccgacgaattgtgggtgatcggctccacgctggaagtgatgccggcggcgagcattgtgccggtcgcggcacaggcgggcgtgccgatcaccatcatgaacatgggacgcacgcaatacgatcgcctggccacacgacttatccgcgacgatattgcgattgcgctgccgcagttggtcaacgagacaatcgccgcggaacagggcaaataacaccgaatgaacaagcaaggctcctcaacctgactgggtttgaggagccttctttgatgcggaagatatgcgagaatccgcgcttatccaccgtgggaaatcagtagatgcgcttgggccggaaaccggccgcgcgcatcgcgtcaaggatgcggtcgatgtgctcagggccgttggtctcaacggtgacgcccaaggaaaccgaatcagtgtaatggctggaagccttgaactggtcgtgatcgagtgcgatgacgttagcgcgctgctcggccagaatcgtggccaccttgacaagctggccaggggtatccggaagctcaacctcgaagttcatgatgcggccacgggcaatcatgcccttctgaatcaccgcgctgatggagacagtatcctcattgccaccggaaagaatcggcaccaccacatgcggaccctgtgcttcggcgaacttgcgcgagcgcagattcaggtgctcaagcgcggccagagacacggcaccggcagcttcgaccaccagcttgtgcttctccagcatgagcaggatcatctcgttgatgtcgcgctcggtgacggtgaccagatcgtcgaggaactcgttgagcagcgcgaaggtcaggtcgcccggacgcttcacggcaacgccttcggcggaggtacgcacctggtcggctgcgacgacgcgaccggcggccaacgaattcttccatgccgggctgccttccggaatggcgccgatcacgcgcacttccggcttgaacgtcttgatggcgagcgccacgcccgcgcccagaccgccgccaccaagcggcacaaccacatcggtgacgttaggcacgtcttcgagaatctcaagaccgatggtgccctgtccgcacagcacttcgtaatcgtcgaacggcggcacgtaaatcatgccttcggtatcgctgagttcctgcgcgtgggcggcggattcatcgaacacctcgccgcacagcaccacatcagcgccgtaagccttggtggcgtccaccttcaacggcggcgtgatctgcggcatgcagatggtggccttcgcgccacgctcacgggccgcgtatgccacgccttgggcatggttgcctgcggaagcggtgacgatgccatgcgcaagctgctcgtcggacaacgatgcgatcttgttatacgcgccacgaatcttgaatgacccagtgacctggagattctccggcttgagcagaatctcatgtccggtcatctcggacagcaccggggacggaataatctccgtgtggcgtgcggtgcccttcagtcgttcggcggccagtttcaattcagcggcatgatcacgccgcaatgctttgagcacctcgttttgttccatggacgttattgtaagcgcacgtctgccgaaaatgccgtgcgattgccgaatcgcaatcgaatcccgccgtgcctcagaatcgcacggaaaaagaaacgtccgacaggtttcgtgatgaacctgccggacgttccgcagagagttatagggaaagatcgatcagagctgaatcacgactccctcccagcgagcgagctcgccacgagcgatcgatttaacactatgcatagcatcataggtgctgagcagtacttgcggatcggacacgccgtcggaaagcagctccgccacgtccgaaggcagcgccgcggacctgtcggtgaggttgaccacgacaagaatcgtgtcgtcgccattggtgcgcgtgaaagcatacacctgatcgctgtcggcggcgagcagatgccattcgccagtggagatggtggcgctgttgtgccgcatggcgatgagcttcttgtagaacgtgtacacggaatccggatcgtcgaattcctcggccgcgttgatttccacatgattcgggttgacgctgatccatggttcgacgggcgcgtctggcgcggtgaagccggcgtatttggaggcgtcccactgcatgggggtgcgcgcgttgtcgcggccgatgagggcgagggcggccatcatggattcggatgactggcacttggcttcctccacgcgctggcgatagccgttgagggcctccaaatcgcggtattgttccagcttggtgaagtgggcgttggtcatacccagttcctcgccttcgtaaatgtacggggtgccgcggtgcatgtgcagcaccatgccgaacgccttggcgctcagctcgcgcgaatcgcggtcggagtcgttgccccaacgggagaccacgcgcggctggtcatgattgcagaagaacaggctggcccaaccggccttcctcacggcctcctgctgctcggtcatacggtcgcgcaggtttttgacctcgaacggcacggtattccacttggagccttcctggtcgatgccgacatggtcgaacaggaatagcatgtcaagttccttgttggccggatcggtgacgtgctcgttacgggccggggtgatgcccggagcctcgcccacgttgatgtagccttcacggccttcgaatacctcacggcgcatttcggcgaggaactcgtcgatgcgcggaccgtcggagcagaacgggaacgggctggaatagccttcctcgccgaccggcagatcggcgatttcggaaccgtcctcgcccggcagcctgccgttcttgtcgacggtcttggagatctgggtgatcacgtccatgcggaagccgtcgatgccgcgatccatccaccaattcatcatcttgtagacggccttgcgcacctccgggttctcccagttgaggtcaggctgcttcttggaatactggtggaagaagtattcaccgcgcttcggatcgtactcccatgcggaaccgccgaaataggagccccactggttcggctcggcaccgggcgtgcccggctcatggcccggcttggcaggacgccaccagtaccagtcggcgtgcgggtcgtccttgtcgcgggaagcctggaaccaggcatgctcgtcggacgtgtggttcacgaccaggtccatgatgaccttcaggccgcgcttgtgcgcttcggcaagcagctcgtccatatcggccatcgtgccgaacagcgggtcgatgtcctggtagtcggagatgtcgtagccgttgtcgtcctgcggggacttgaagaccggggacagccacagcacgtccacgccgaggtcggcgaggtagtcgaggcggctggtgatgcccttcagatcgccgatgccgtcgccgttggaatcctggaaggaacgcgggtagatctggtagaccaccgcgttcgcccaccacggattcggggtggcgccattcgaacggacggtgtcaggaagagtggaacgattgaaattcgtcatcgcgattgagctcctttgcctaagtggaatggatgaactttgctatatcccatggtacgtaaagcgttttttctttcttgcctgcggcgcgttttgcaaagcaggaaatgaaagatatattgcaagcgggatgcgcccttcggaatcacatcaatgcatacgaaaagcgggaatcctcgaaaaaggggaaacgaggattcccgctcggcgctgtgaagttttacttcacaagcagacgtcctacggccgcgttgttcctgccttcgctcgcctatcggctcgctcaggaggagcctatgaacagtccacaggactgttcacttaacggctcctctcatcacaccaccgacgacccacttttgggcgaagatgtagacgatgaggaccggggccatggccatcaggtaggaggcgaaggccatcgggtagttcgacgtgaactggctctggaacacgtactgcgccagcggaatcgtctgattgctctggtcggtcagcgtgatcagcggcagcaggaagtcgttccacgcccacagtgcggtcaggatggcgatcgtggcgttgatcggtcccatcagcgggaagatgatcgtccagaagatgcgccaggtcgaagcgccgtcgatgcgcgccgcctcttccaacgaaatcggaatcgaacggatgaagccgatcgcgatgaacaggttcgtgccgatgccgagaatcgtgtacagaatgatcagaccgagctggttgtccaggtgcagggtgcccatttccttggcgatcggcagcatgacgacggtgaacggcacgaacatcatggccaggaagaagtagtacaggaagcggaagaaccgcttatccatgttccttgccacggcgtacgcgacgaacgtgttcgtcagcagcgtcagcaccacagcgcacacggtgatgatcgcggaattgagcgcggccttcggatagttcaccttgttccacgcgtccgcgaaattatgccattcccacgtggtcggcaggctgaacgtgcccgcttcgcccggcgtcttcagcgcggtgacgacggcgaagtacagcggcacgagcaccgtcaggctcagcacggcgacgaccgccgtcagccaccagttgatgctgtggtccttgcggatcttctccggcttcgcttgcgattgtccgctttgcgcggcggccggcttggttgcaacagttgcgctagtcataatttcttccccttactctcagaccttttccttgccgctgaagaacttcagctgcacgaatgcgaggattgccagcacgatgaagaacgtgaccgcgttcgccatctggtaggagtattcgccgttgcccaggccgttctggaagatcaggtaggagacggtttcggtcttggaatccggaccgcccttggtcaatgccatgacctggtcgaacgcgccgagcgagttcttgaggctcagcaccatgttgatggtgaagaacgggccaatcagcgggaacgtgatctgccagaagttctgccaggcgttcacgccgtcgatggacgcggcctcatagatttcgttgtcgatggtctgcagacccgccaagtacagcagcgtggagtaggccacaccctgccagatggacaggaacacgatcgggaaccatgccagatccggattggagatcatggatgtggacagccaatcgatgtgcagcgcctggccgagggccggcagcggggtcatgaagatgtacttgaacacgtagccgatgaccagcaccgacagggtgtacggaatgaagaagatggctcggaagccgttcttgaaggcgattttggagttcagcagcaccgccaggaacatgccgaggatgttcgtgccgagcgtgatcagaatcgcgatgaaaatcgtgaacagatacgcgtggccgacgcgtgcgtcctggaacatcgcgatgtagttcttgaagccgatgaacttgtaatcgccgtaaccctgcgaattggtgaacgagtacatcgcgccctgcaggaacggcaggtacaggaagatgcacacgagaatcatcgcgggaatggtcatccagtagaacgccggatcgaccttgcgcttggagtatttcgaaaccttcttcggcttctttgcggcggccttgtcagccttggccgagatattgccagtcattgtcgttcctcccctcacctaaagttcctggcttcgatcttgtcgtattccgactgcatgctgttcaggaatcgcttggtattgcccgactgcaccaacgtctgcaggaaaccggcgaggttgatgcttgccggcacgtagtggtcacagaaatcagccagcttgccggccttgtagaagtcgagcacgccattcaacgcttcatcgccgacgtacgtatccttgtacggggtgaacgcagactgctgcttggagtaatcctgcacgttctcctcgctcatcaggaagtcgacgaattcgcgagcctcggtgtaatgcttcgtatgcgcgccgatcgtcagcatcacgtcgtcgccggcggtcagctgctgttccttgacgttgtcggtggccggcatctgcgcgaaccgcagattggcgtccttgttgatcagacggatctgcggaatcgcgtacgtgccgagcggcagaatcgcggccttgccggaagcgatgtcctgcgtagcctgctggtaggtgacggccggattcttctgcgtgtagttctggtaaatttcaatcagcttgccgctgacgggcgtccacaagtcggagaaggtcttgctgccgtccttgagatacgcgtattccgattccggcaccagcgtcgaattcagcgatgcaagcggcgcctgcaacgtccacggatcggcggtgctcgcctcaaccggcgtgacgcccttggccttgagccgcttgagcagcgcgatgaattcgctccacgtctgcggcggattgtccggatcctcgccggcctgcttccacacatcggcgttgatgatgtagccgcttgcgttgcccgcgtacggaataccgtacagacgcttcttggacttgtcggtggtctgcacgaggctcttcgcgatgttcaccatgcccggattgagctcgtcgacgatctcgtcgtcggtgaaatcgtggaagacgcccgcttcggcgagcatgccgtaattgatgtcgccgttgatggtgatgacgtcgggttcgcggttcttcaccagtcgcgtgcgcagatcggtggtggcgtccgacgaattgttgacattgactttgatgttggaatgggttttctcgaattcacgcgccttggcggtgaaccaatccgccgcctcggacttgaattggaagaaatccaaggtgaccgtgccggcggtgctgttgccgcagcccgcgagcccgaccgtcaacgcgaccgcgcatgcagccgtgacgacacgacccgcgatccgcctgaaagtgcctgcgttggcattggaatcaggtttcattctctcgactcctttgtattttcctttttcacggcaggccggcttcattaccagcctccgttgctttttaattgtagaatcggcttgttttcattcccagtttccgcgcgcccgcactgtacggaaataaaaaacggttattttgttattcttggaaagaaaatagacggtaaggacggtccgatatggcgatttccccgattccacactggtttgaaggttccgaatacacgcataaagttgcagcttgcattatgaaatacgggccaatttcacgcatcactttggcgcagattctcgggctttcgcaaggtgcggtatcgcgcatcaccagtgatttgatttacgctggcgtgatcgaagagacgccaatggcagcggggcatggcggcaagttaccgaaagatttcttgcggaaatcggcacaaaagtcaatccagaaagaaaatacggaacgtcgcggccgtccgcagaccggactgcgcatcatcgccaatgcgcgcacgttcgtcggcatgaaaatcaacaccacccatatcactgccgtaacagtaaacgcgcttgggcagattgtgaccggctgccatgacctgccgctcgacgacgattcgccggaatcggtggtcgacgtcatcaaacagctgaccatggattgcgccgacgaggcggtcatgtcgggcctgcccgcaccgtgcgcgatcgacgtctcattgggcggacatatcacggacgattcggtgacgacgttcgcaccgttcctgcactggtcgaagccggtggatttttcggcgatgattcgcaaggcgaccggcctgccgaccggcatttacaacgatatcgattcgttggcggtggacacgtgcatgttcggctcgggcgtcggattgaacagtttcgccgtggtgacgatcggcatcggcgtgggatattcgctcaccgtgaacggcgagcctgtcaacaatcccgataaaagctacggactggtcgggcacattcttgtcgatccggacgggccgcgctgcatttccggacataagggatgcgcgacatgcctgactgacaattcgatcgcaacggaatattcggaaatgatcggacatccggcgacgttcgacgaattcgcggccgcagcgcgcgccagcaaaacgcaggccacgaatctggtgaaccgcacctgtttccgtttgggtacattgatcgcgaccatcgccaatcttgccatgcccgacaaaatcatgatcgctggcgaatcgtcgttcattgcgaaactcggcatagacaacctgcgtaacggcatcaatatgtatcggcatagtcaagccgcgccggtcgatttcgaaatcgccgaccacgactgggcgatgtggggcaaagccgccgccgcgcaggcgatccggcagtatgtgggctgactacgcagaccgatacagccgatacataggctgattacacgatttgccggcactgaagggggtcagtgccggcaaatcaaaaataaatcggaagcgaatcagaaagtaaaccagttacttcagacgcgcaccaccttgaacaggacggcttgcgccggatgaattgccggcggacggatgccgtaggtggcgagcgcacggccggtcatcttcacaccatcggcggtccaccagccgagcgggctctggccgttgccgatgtcctgcttggccaggtcgaggctcacgtcgagcggggacacttcatatacggtgtccgggtcgaggccaggcagcttcacgggagcggccgggtaggtctgcgaggtggtcagctgggtgaaacggtagatcgcggcggccttgttcggcatcacgcaaccgtccacacgcacggcggggtcggccgcgtcggaatgcacgacggtgtcgacggcgaaccattcgcggtgcttcttgaattcggcggtccattcggcgagcttgtcgatgtcctcctgcggttccttgagcaggttccattcgatgcccatgtggccgaagaaagccatggccatgcgcatttcctgcgatgtggcgcggtgcgtggaatgcgccggggaggcgcccacgtgctcgccgatcatttccggcggcaccagcagcgacgtgtagcgctggatgtcggcgcgttccaccgggtcgacgcaatcggacgcccacacgcggtcggcgatcgaaagaatgcccaaatcgatacggccgccgccggaggagcagctttcgatttccaggccggggtgcgctgccttcagatcggtgaagatcttgtacacggcgagcgtctgcgcgtgcgctgccggacggccggtcagcggcgagacttcttcggtgacgagcttgttgtggtcccacttgatgtagtcgatgcccagctcgctgacgagcttgtccatcgcaccgtaaatgtagtcgtacgcgtccgggttggtcaggtcgacgacctgctgggtgcggccctgcatcggcagacgaccggcggtgggcttcagcacccagtccggatggttgcggaacatgtcggaatcggggttgaccatttccggctcgaaccacaggccgaattcgaggcccttgccgtgcacgtagtcggcgagcgccttcagggacttgtctccgtcgggccagacgtcctgcgaaatctgccagtcgccgaggccggcggtgtcgtcacggcgggcgccgaaccagccatcgtccacgacgaatcgttcgacgccgctttccacggctttgtcggcgagggcggtcagggtgtcgtaatcgtggttgaagtagacggcttcccacgtgttgaggatgaccggacgcggcttgggcgcgatgccatggtccacgagccagtcgcggtgcacacggcggatgtagccatggaagcgggaggcgacctcgttgagcccttcgccgtaggaaccgacgagccatggcgtcgtatagctttcaccgtgttccagaccgacttcgccgccgaagagcacttcgccgccaccgatcacgccagtggtgtagggcagtcgttccgcggacagcacgctgttgccgctccatgccacgtgcgcggagtagacgttgccgtgggtgaaaccgaagccgtgttcgccaacgctgagcagcagggtggcgtcgaagtcggggcggccgatcatggaggatttggcgaagcgcccgatggtgaagtcctggcgctgtggggaacgctcacgcagatggtgaccggtggtggtgaggatctcgttggcgtcggcgggcacgctgaatgcaagttcgatcttgccgatctcgagtcgtccctcgccggtgttcgtcacctccgcatgctggcggatgaggccggtttcatcgagctcacaggtccacgtaagtttcacgcattgttccacgtcctcggcagtgacggtgacggtaggcgtctgcttgggctcggaggccacgctccagctggggtagccgtctttttcggccatggtgtaggttttgccggcggccacggtttcggctttgatgtcggtgacctggaacttgcagaacagttccacgccgtcacggcgcacgtcgaaacggtcagagccggaccacgcttcggactgtgtcggcagcacgctcggccatgcggtgtagtcgagggctccggaaacacgctgcggagcgagcgcgtcgaacgtgttgatcacggtttccggtgcggtgagcgggcgaccccaatgcacgaatctcggcaaatcgctgccggggaacaccagagcaaaagctgcggcggcagccggctgctcggcatacacggcggtaaggggtgtgccgttggaagcggtgccgtggaaagtctgaatgagcgtcattgcagcatccttttcttgcgattcttggttggtatgacgctttgatggtactgcataccgcttttcttctcgtcgccctgcgtgtttgtttctttcggaaagtaattagcgtcggcgcgcgaagaaatcggtcatcaatcgcccgcattctgcttcgcgcacaccgccaatcacttccggtacaagtccgacgtgcggatcgcggggaatatcccataccgaaccgcatgcacccaacttggcatcccacgcaccgaacacaatacgtccgatatgcgtctgcaggcaggcaccggcgcacatagggcacggctccaacgtaacgacaagcgtgcaatcagcgagattccaagtgccaagcgaggcggccgcttcagccatcgccttgacttcagcgtgggcaagcggatcggcatgcgtctcacgcaggttccgcccgcggccaatcacccggccgtcagcggcaagcacgacagcaccgaccggcacctcgccatccgcggcggcttcgcgggccagcgcgaccgccggttccatatcatcgtcccatcgcatacgccacagtgtagcggcggccatacgaccgctccgcacgactggtccgcacgtccgacctgcatgcccgacctgcgcgcccaaccgaagcggcacgaacgtcagcccatagcgaaacacgctcataaccgcctcttggtaggctggaaaaggttggaaatacgcgcaaaggaggcacgttggcggtattcgagttgattctatgcatcatcgctgccgtcgtactgtcctcgttcctgagccgattcatacccaaggtctccacgccgctcgtgcagatcgcgttgggcgcgctggcatcacaactgccgttctttccggacgtaacgctcagccctgaactgttcatggtgctgttcatcgcgccgctgctgtatttggaagcgcacgaaatcgacaagtcggagctgcttaaatcggtgaaactgtcgttgtcattggcgatcggtttggcaatcgcgacgatggtggcggttggtttcgcgttgcatgccgtatggccggcgattccgctcgccgcggctttggcgctcggcgccgcgcttgggccgacggatgcggtcgcggtgtcgtcgctcggcagggaagcggcgctgacgcaacggcagacgagcgtgctgaaaggcgaatcgctgttcaacgacgcgtccggcatcgtcggcttccagttcgccatcgcggcggccgtcagcggcgtattcgaagtgggcgaatcggccatgcaattcgtggcgtccttcttcggcggcgcattcttcggcatcgtcgtgggcatggtggctgacgtggtgttcgaaacgatgcgttccctcggctgggaaacgatgaccacacgtattctgatggagctgttcctgccgttcatcctgtatttgggcgcggaggcggtgcacgtttccggcattctttcggtggtggccgccggcctgcttatccgcttcgaccgcaccggcatcggcccgaatgtggcacgtacgaatatcgtctcatccagcgtatggggggtgctgtcgttctcgctgaacggcaccgtgttcattctgctcggcatgctgctgccaagcgcgatgaccaccagctgggacgatccgcacgtcagcaattggctgctgctcactgcgattctcgtggtttccgcagtggtgatcgtcatgcgcttcctgtggatctcactgatgctgcgattggcgcgcgacaccaccaccggcaagcgacgcaagatgacggcgaagcgctggcgatcggcggccgtcatgacgttcggcgggccgaagggcaccatcacactgtcattgatgttcaccattccgtacacgcttgcggcgggagcgaatttcccgatgcgcaacgaactgatcttcatcgccggcggtgtgatagtagtgacgttgctgctggcgaatttcctgctgccgttgctcgcgccgaatcgcaataaggacacgtccacggaaatgacggaaatcaccatcgaagtgctgcggcggaccgtcgaggagctgacgggacgcgtcacgtccgacaaccgacgtgcggtgctcatggtcatcgactcgtatacgaaacgcatcacgcgactgaagcaacgcaccggcgaaatcgacccgcaagggtacatgagactgcagatcgatgcgctcaattgggagaaggaatacgtcaagaatcgactggcgggcgtgcgcgctgcgatcaaggcgaatccgaccgggaaccgcgccgcgaacgatctggaagccgaggcctgcgagcgcctgctcgaccagatcatgagctcgctgcgccacatcgagacggaacataattccggtcgtacgatctggcgattgaagggccgtctgcgcgcattgcagcgtcgtacaggcacgctggtgaggcgtgtgaacagccgtatccggcgcacgaccccgctgttcagcgacgatgaactgttcgcgcatacgcgcgtggtccaagtggatgcgatcgaacatgtgatcgaccgactgtatgaggagatgggcggcgacacgtacaacaccgagcactgctccggcctgctgttggactaccgacgcagcgaatccgcgttgagggcgcggccgaatatgggcatcagcgccgaagcgcaggaacaggccgaggaggtcaagcgcgaaagctacggcatcgagctgggcgtgatccaggacatgtacgaggcgggcgacatcacgcgcgcgcaaagcaagcagctgcgacgcaacgtgtatgtgatgagcgtggatgcggacgcgcagatctgacccgggttgcgcgctcaggatacacgtttccctcgcacgttcatcgtgcttagcggccacggcatatacctgtattaccagcgcgaacagccaatcccatgtatccctcctaccgaggaaaaatacctcaaggaacggaagagcagggatcacgcgtccgcatccgaaaatcatcggaacagaacccaagagcgcttttaaaacttttgcatatgataacgcatgaatatttgagacaaagtaggtatcttggaataaagatgaggtttttcacttcgtccggtcggaaataagccgaagtgaaaacaatgtggataactctgcaaagatgagaattgtctgtttcatttagacacgaatattcctttcgaaaagatgattgacaaataccccctgacagcctattgtttagtcatgcttcatcgtcattgtaaagaaagggaattgaatgaaaatagtcaagagaatatctgctcttttcattggtctagctcttatggcggctctgcctgtcaccgctcatgcgtctacaaacgatgatcagcaagacatcgcatcattggatatgtccgtcatcgacgtgcaaatacaatcacgcggcgttatgaccgcggaagatctgtacgacttcctccaatccgatgcagagaaaactgttgacatcgatgctgaaaccgggaaaattaccgccgtgagcgaaggtataacgaagcctaggattgcggtcaacaatatttgcaatggccgtgactcatgccttatccacagtcgtgttccttatgcggacttcggatttagcgggaccggaacgaagaccgggaattggccctaccgcatctcttgggagactggttctcatacggcaaaagcttggtacagacatggctatgacgttgttggatggggcactaagttcggacctcacaccaaggccaatatgaacgctcctgtcacggctgttcaagtcactaattactcgtgatcctgcatgagtttctgacgcagaagataaagacggctcatcagaattctgatccgcctggacatatgccgccggattctcaggaagttttcagaaaacaccagacatgtgctcagcatcgaatggttatatatgaactgtcagcacaacgagctgaccaggaacacaagagttcccgacaattgaaccctttcttcttctctctcctttctctccccggtggccgatcccaccggggtcttcttttttcacgaccaccttctcacgctatcgacgcacgctatattgggaaggtatgagcgacgcaatcgaacatgaaattccgcaaaccgcagacaacagcaacaaaacggagctgatcggacgcgaatcggatgtggtgccgggccgtttcggcgaaccgctgcaggtgacgcacgtccagtattcgcgcggcggcggcaacgcggcaccgaaacggccgctgttcctgtgcctgcatggctggggatcgaatgaggctgaccttgccgatatgatgcgatacatcgcaccatacaacgattacgcttcactgcgcgcgccgctgacgctgcaggcggccggcacgttcactccaggcgcgtactcctggttccatgattgcgtgccgtccggcgaagacctcgaccgcgacgcgttcgccgcatccatggctatcgacgattgggtgtcgcagaacattcccgacgaccgtgccgtggtgccgattggtttttcgcagggcggtctgctggcgattcacctgttgcgcgtgcatccggaacggtaccgtgcgtcgatttcattgtccggattccttgcgcctgggctcgtccgcggcaccgcgcctgccgacgaccgtatcgcgccgctcaatattcccacgttcttcggttacggcaacagcgatacggtgatcgccaagccggagcttttcgccatgagcgcctggctggacgagcacacgttcctcaccgcgaaaagctaccgtgggctcgaccactccgtcagcctcgacgagttcagcgacctacgcggatggctcgccgtgcatgacatcgcgccggggattctgtgatgcatcagtcggtgatatcggccttgtagaagttcacgtaggagcggctcggggtcgggccacgctggccctggtagtgcgagccggtgccggcggagccgtacggatgctcggcgggcgagctcagctggaagaagcacatctggccgatcttcatgcccggccacagcttcaccggcagtgtcgacacgttggacaattccagcgtgatatgaccttcaaagccagggtcgatgaagcccgcggtggagtgggtaaggatgccgagacgaccgagcgagcttttgccttcaagacgagccgcaaccgtcgagtcaagcttcacatactcccacgtggagccgagcgcgaactcgcccggatgcaagatccacggctcatcagaccggacttcgaactgctcggtcagctcgccctggttctccgccggatccacatacgtatacgcatggttgttgaacagacggaagaagcggtccagacggacgtcgatcgacgccggctgcaccatttccggggtccacggatcgagcgaaatatggccgtcagcctgtgcggcgagaatgtcgcgatcggacagcagcatcgaaattcctccaaacatcaccggaacaatcgtcatatgagcgggcgcgcagccaacgcgcgcccaccaactgtcgtccagtctagcccgtcgacgctataagccagcatcaccgccgatgcatcgcacgcagcacgcacttgcgcagctcggaggcgacgagcacaatcatcgccaggccgaggcattcgacccacgcacccgcggacagcggcaccgtgccgaacgcggcgttgaggaacggcacgtagaccaccgcaagctgcagcagcgtggacagtgcgatcgcaccccacagccacttgttggcgaacagccccacgaacacggactggtcgtgcgagcgagagcacagcgcgttgagcatctgcgcaaacacaaggatggtgaagcccatcgtgcgcgcctcagtcatttgcgcatcatgtccgacagcatccacggaacggtccgtgaacagacctccggcgaggtgcatgtccatgccaatcagcgtgacggcggccatgatgatgccgatgaagatgatgtcgccccacatctgtccgtcgatcacacgatcggtgagtttgcgcggtttgcgtgccatcacgtcgtcggtggacgggtcgacacccatggcgagcgccggagctgcgtcggtaagcaggttgatccacagcagttgcgtggcgagcagcggcacggtgacaccttggctgccaggctgggtgatgccgaggaatccggcgagcatcacaccgccgaagacggtgaacacctcgccgacgttggagctgagcaggtatcgcaggaatttacggatgttgtcgaaaatgccacggccttcgcgcaccgcttcgacgatggtgctgaagttgtcgtcggcgaggatcatcttggcactctgcttggtcacttcggtaccggtgatgcccatggccacgccgatatccgcggttttgacggcgggcgcgtcgttcacgccgtcgccggtcatagccacgatattgccttgccgttgcagcgattcgacgattttcagcttgtgttccggcgcaacgcgcgcgtacacggagatttcgcgggtggccttgtcgaacgcttgctcgtccggcagctcgtcgagttgaacgccggtgagcactttgctactaaggtcggcgctgccgaccgagctgccgtctccgtccgtttcaataatgcccagatcgctggcgatgcgtgccgcggtcagcggatggtcgccggtgatcatgacggtacggatgccggcgcggtgcgcttcggcgacggaatcgcgcacttcggtgcgcggcggatcgatgatgcccaccatgccgacccagatcagatcgttttccagcacgtcgctctgctcggctatatcgaccacatggccggcggcgttgatcgccacacccggcacatcggcaagcgacgcggtgccgagcggacggtatgcctggccaagcgtgcggtacgcttcggcggacagacgttccacggctgcgaggatctgctggcgatcgccttgcgtcatcggtcgtacggcaccgttgaccgcgatgcggctgcagtagccgagcagtacatcgggggcacccttggcgaagacggtgagacgcccggcatcggcgttgtcctgcgcgacgacggccatgcgtttgcggtcggaggtgaagggaatctcgccgatgcgcgtgtagttggcgtatttgcgatcggccttcaccttgcgtgcggcgacgataagcgacacttcggtcgggtcgccgacggcttcccacgttatgtcggaagcagcggaaccatcgccggcacctgtgttttcgcgcagttcgccgtcgttggccagcgcgcccactgcgagcgtggcgacggcttcaagctgtgccgcttcctgcgcgggcgacggggtggatgtaagcccggcatcgggaatcgcaatcattctgccttctggcgcatagccggtcccagtcagctgcacctcgccgctcggcgtgaccacgcgttccaccgtcatctcgttgcgggtgagcgtgccggttttgtcggagcagatcactgacgcggaaccgagcgtttccacggaatgcagtttcttgacgatcgcatgatgttcggccatgcggcgcacgccgagtgcgagcacgactgtcagaatcgcggcgagcccttccggcacggccgcgacggccagcgaaacggatagcagcagcgaatcgattacgtcgtggatgtcgttgaagccttcggtcagtgcaagcgccaccagcacgaccgccgcgataatgcacaccgcgatgccgagaatcttggaaacgtagttcatttccttctgcagcggactgtcatcatcatccgtggcctgcagaaggtccgcgattttaccgacctgcgtgcgcatgccggtgctggtgacgatggcacggccggtgccttgcgtcacggacgtgccgttgaacaccatattggcgcgatcacccaaggccttggcctcggcaagtgtgtcgacgttcttgccgaccggtacgctttcgccggtcaggctcgcttccgccacgcgcaggctggcggcggcgagcagacgtccgtcggcgggaatggagtcgccttcaccgagcacgaccatgtctcccggcaccacgtcgacggtgttgatgcgtgcgattttgccgtcgcgcagcacgttggtttgcggcgcggtcatttgggagagcgcttcgacggcttcttccgctttcgattcctgaatgtagccgagtaccgcgttgacgataaggataagcacaatgacgatggcgtcgaacggcagtatttcgccgccttccgcgcctggcgcagcgttggctttttcgatgaaccatgcgatgagcgagatgccggtggcagcgagcagcaggtagacgagggggtctttgaactgcgccaggaacttcttccattttggcacgggtggtgcggatgcgagctcgttcggcccgtattgcgcgagtcggcgttcagcttcggcttggctcagaccggtgttcggatcgacgccgagcgatgcggccacggcttgcgcgtcggcaagcgacgggtcgatttgtggcggctgctggttttgctgatcctgccgaatctgcgtgcgatcgcccgtagcggaatcgccgtcaaaattggcatgggactggatggactgatctttcttgcgatcatccatagtgatctccttgggagcgccgcggagtagtcagctctcccccgtcttacgtatgcctcgaatcgcggaaatcgaaaatccgcggaatcgcaagcattttgcaaaggcgaggcaacgctgcgcggttgtgggcaccgggcggacgccatcggcgcatcctgttattatcgcacatcttcggcgtgtgaaaaatggacatgtggcggaacgatgcatggcacgcgacggatgcacgataccatgaagtgtgatatattatcggtagttagtaaaattcattactaaacggtcgtgcaacatcgcacggcgcaaccgcaacgatgcagtgacaccaagtaatacagggggatgcaagatggcagatacagccgaactcgcaatcgtacatgcaaccacggcaagtgcaagctggctcaccgatccgacggtgttcgcagcgaaccgcaagccggcacattccagccaccgatatgtcatcggcgagacgagcgagccgaagcagagcctcgacggcgaatggaaggttcgtatcgaacaagcgcgcaacgtggacgtggaaagcgctccgttcgcggccgtcgatttcgaggatggcgatttcggcgcgatcgaggtgccgggccacttgcagatggccggctatctcaagaacaagtacgtcaacatccaatatccgtgggacggtcacgaagatccgcaggcgccaaatattccggaaaacaaccatgtggcgatctaccgccgtcgattcgcgctcgacgcgcagcttgcgcgcacgctggaaaacgacggcacggtcagcctcaccttccacggtgccgccaccgcgatctacgtatggcttgacggcacgttcgtgggttacggcgaggacggattcacaccgagcgaattcgatgtgacggaagcgctgcgaaacggcaatggcaacgccgccgattcccccgaagccgagcatacgctcaccgtcgcctgctacgaatattcgagcgcctcttggctggaagaccaggatttctggcgactgcacggcctgttccgcaccgtcgagctcgccgcccagccgcatacgcacgtcgaaaccgtgcagcttgaagccgactacaccgcagccgacaccgccggtacggccgacaccgccgaactcaacgcggcactcaccttgcgcaaccccgccgacgcgatgactatcgaaagcacgctgcgcgacggcgacggaaatgtcgtatgggaatcaacgcaggcctgcaacggcgaaatcgcccttaattccggcaaaatgacgaacatcgcgccgtggagcgcggaatcgccgacgctgtacacgctgaccgtacgcgtcgtcggacatgacggcgccatcatcgaaaccgtgacgcagaagatcggcttccgcacattccgcatcgaaaacggcattatgacgctcaatggcaagcgcatcgtgttcaagggcgcggaccgccacgaattcgacgcgaagcgcgggcgtgcgatcacccgcgaggacatgctttccgacgtggtcttctgcaagcggcacaacatcaacgccatccgcacctcccactaccccaaccaggagtattggtacgacctgtgcgacgagtacggtctgtatctgatcgacgagacgaatatggagacgcacggcacgtgggtggcaaacaatgtcgagcgtcctgaagacggcatccccggcagccgccccgaatgggagggcgcgtgcgtggaccgcatcaacagcatgatgcgccgcgattacaaccatccgagcgtgctgatctggtcgcttggcaacgagtcgagcgcgggcgaggtttttcgtgcgatgtatcgccacgcgcacacgattgatccgaatcgtccggtacattacgagggttccgtgcacatgcgcgaattcgaggatgtgacggacatcgaaagccgtatgtacgcgcatgctgacgaaatcgaacgctatctgaacgacggcagcccggcacatacggacggtccaaagaagccgtacatttcctgcgaatacatgcacgcaatgggcaattcgtgcggcaatatggacgaatacacggcgttggaacgctacccgatgtaccagggcggtttcatttgggatttcatcgaccaggcaatcgagaccaagctgcccgacggcacgacacgcatgtgctacggcggcgatttcggcgatcgtccaagcgattacgaattctccggcgacggcctgctgttcgccaaccgcaccccctcgccgaaagcgcaggaagtcaagcagctgtatgcgaacgtgaaaattgcggtttcggtcgatgaagcgcgtattacgaacgacaatctgttcgtgtctacgggcgattatcgcttcgtgctgcggattttggccgacggcaagccggtatggtcgactacgcgccgtttcgacgtggccgccggcgagagcgcttcattcgaagtcgattggccggttgatgactaccgcagcaacgccgaagagctggttttggaggtatcgcagcagcttggcaacgcttgcgattgggcaccggccggctacgagctggcgttcggccagtgcgtggtggcaggtgcgaagaccactgcagatgccgttgacgcggccggagctccggccgacggcaccgtcacccttggccgctggaacgccggcgtgcgcgggcagggccgtgaagcactgttctcccgcacacaagggggtatggtttcatatacgttcggcgagcgcgaattcgtgctgcgccgcccgtcgatcaccacgttccgtccgctgacggacaacgatcgcggtgctggacacgctttcgaacgtgccgcgtgggcggtcgcaggaaagtatgcgcgttgcgtcgactgcgcaatcgcaaatcgtggagaaaatgccgtggaagccacgtatacgtacgaattggcgattccgcagcgcacgaaagtgacggtccgttacgttgccgacacggccggcctcgtttcgctcgacgtcgagtatccaggcgagaagaacggcgatctgccaacgattccggcgttcggtatcgaatgggcgctgccggtggaatatgcgaacctgcgattctacggcgccggtccggaagagacgtacgccgaccgcaggcacgcgaagctgggtgtatggagcacgacggctggcgatgattgcgcgccgtacctgctgccgcaggaaaccggcaatcatgaggatgtgcgttgggcggagatcacggacgattccggccacggtgtgcgcgtgaagcgcggtgccggcgcaaagccgttcgcgatgagcctactgccgtattcgagcacgatgctggaagaggcgctgcatcaggatgagctgccgaagccgcgtcacatgttcctgcgtctgctggccgcgcaaatgggcgtcggcggcgacgattcgtggatgtcgccggtgcatgagcagtaccagctgcccgccgaccagccgctcagcctcaacgttcagctcaagctgttctaagctaagccagcttcagcctcaagcataaccgccgattcgcggcataattccggccgacttgccaataggcaggccggccgattctgttgatggctgaaaacaggcagggtgcctaaaatgaaagcacgtctttgaagcaaacgacgcctcaaagcatgtttttctgaaggagggcatcatgagctatccaaatatgaatcccggcaatcccaacgaccccagtcaaccaccgcagccgggatacggcgcctatgcaccgagccagcaagcgcagcaatcgcaacagcaggacggtccacaaagcggcggaccagatgccgagcagacccctcgctattccggcaatccatatggcaacccctacggcaatccgtatggatatccgtacggtaatccgtatggttacgacccgaatagccatagcaacgacagtggcgagtgggagccggtaagcccgttcaagttggtggaatcgtggctgccgcaacgcgcgaagaatgccattcgcggtgtgtacggcgtgctcggcgtgatggcgattgtgctcggcattgcgctactcatctggccgggggtgacgctgaagatcgccgcggttgcgttgggcacgtatttcgtgatttccggggtgatccgtatcgtcaccgcaattgtggagctcggtctgccgggaggctggcgcgtgcttgacattctggtcggcctgttgctgacagtcggtggcgtggtcatgctgaagaatgcgaccctgtccggcgccatgctggcagtgctcgtcactatggtggtgggcctcggctggatgatggaaggcgtgatggcgctggttgagtcgtggcatatgccaagttccgcatgggctgtgatttacgcgctgatttcgattgtggccggctgcatcatgctgttcagcccgctggcctccaccggttggctgattctgtttggcggatgcgcgttggttgcacttggcattgtggcgatcgtccgcgcgttcacgtttggcaaggtcggcaagtccggcaagaagcgctaactacgcgtagttctcccgtataggcgataaacccatacgggagaacgcgacgtgccgtacgattgacatgattttatagtcgcgctatgctaagtgaaacgtttcgacgaaacgattcgataaatagcggatagaacggcacaagagggaggcgagacgcatggcaggcatcaaagacgtggcccgcgaagcgggagtttccgccagcaccgtctcctatgtactatccggcaagcgttcaatctctgcgaaaaccaccgacaaagtcatggccgccgtagagaagctcggttacactccggacgccagcgcccgtaagatgcgcggcatgcgcaaccagatcatcgcgttgagcgccccgattcgaggcgacatcaaccaggccaggtacaacgcctacttcctgcgcaccgcatgggccgcaaggaatgcagggtatgacgtgatgttgctgaccggtccggatgcagtgaaggatatccgccgcgtgacgcaaagcaatcttgcggatggcatcgtgctgctcgacgtggagcaggatgacgagcgcgccgctcaatccggcactttttccaagccgtgcgtggctatcggctatccgtcgtcgcacgccggctgcgcctgcgtggacatcgatttcgcgctgatgggccgcaaggccgtcgacttcctgtacgagaagggacaccgcaccgtcgtgttcctgcgcaacaacgaatccgactacaaccgccattccggttacgtcgtcatcttccgcgaaagcctgctggcgcacgcgaaggagctcggcatgacggtcatcgaatccgagcattacgaagcggacagcttcgacgcgcagcacttcgtcagcaccgtcttcgcgcaccccgaccgcccgaccgccatcatcaaccaggcgaacgcaagcgtcctcagccaggtgctgatggcgttgcacgacgcgggcatgtcgattccgcaggacgtttcggtcctgtcgtgcggcacgtatttcgaaggcgagccgacgcgcttccccatcaccgaaatgccggtcatgccggaggagctgtgcgccgaagccatgaacctgttggtctccgccatcgaggagcacaccgacatcaaaggttccgtggaactcatcgaacccgcgatgaagcgccgcggatccgttgcggaagcggggtccggcggaacaatatagattttcctgcgattaccggaaggcagagcggccggacggaatcgcaaggcaacataatttcatacggataatcgaaacgtttcaatgacgatataacggtctccgaagaaaccgaacaaacgaacaagccgggcgaaatccggcgaatccaaacggaccgcggaatcgcacgcacgtcatcgaaacgtttcaatacaaccagatgtgagccgtgccgcagggcgcgcctcaagaaggaaacaaggagaatagcaatgaacatcaaacgaggactggccacactggccatcgcagcactgtcgctgacctccctcgccgcatgcggcagcgataccgcccaggacgaggaaaagccggacagcctgtcgttctggtactacgaagaggacgacgcaggccagacccaggcttggcgtcgcgcggccaaggccttcgaaaaagagaccggcgtcaagatcaacttcgaacgaaagtcgttcacccaaatcgcgcagaacggcagccaattcctgaactccgacgaagcgccagacctcatggaatccaaccgcggcaacggctccgccggcgtgctctccaccatgggcctgctcaccgacctcggcgactatgtcaagcagtacggctgggacaagaaggtgaccggcgcaaacgcagcagtcgccaagtacgacgagaacggcatcatggacggcgatacctggtacggtatgaccagctacgctgaattccagcgcgtctactacaacaaggacctgttcgccaagtacaacatcaagattccgaccacctacgacgagttcgtggacgcctgccagaagttcgtggacgccggcgtgaccccgattgcagccgacgcgcaggaatacggcgtgatgtggctgtggtggcagctcgtttccaagaatgccgactccaagttcatcgacaactggcagctgtacaggggtgacgtcgactggaattccaaagtgctgaccaactccgtcaagaccatcaacgagtggcttgacaagggcttcatctcccgcaacgccactggcatgaaggccgaggacaccacgcaggccttcatcaagggcgaatatccgatctaccagactggtacttggaaccagggccgtttcgtcaagcagatcaagtcgttcgattgggacgcggccgtcatgccggaatccaactacgcagtcggctgcgcaggcaacctgctggtgattcccgagaagtcgcaccacaaggatctgtccgccaagttcatcgactacgtcctctccgatgatgtgcagaacttcctcggcaacgcaggcggcattccggtagcggcagacaccagcaagatcaccgacgcgaagagcaaggccatgatcgaggaatacgattcctacgccaaggacggcaagctcagctactacccggattacgcggcctccaacctcaccgacgcggttccagcggagttccaggagctggtcaacggcaccaagaagccggcagacgtgctcaagaacatccacgagaagtacgacaccggcgtcgaggacatgggcgtcaagaacaactaaaaacaaccgatccttcctttccattccaactccaataatggtgcggcccgccttcgggcggaccgcaccaaccctttcctcccccatacattccgcacgtcgcatcgcgccaaatcgtgcgtcatcacagaacaatccatcggaaatccctcggatcatcaacatttcaaaggacttgcaatgtctcaaaagaccaagcacgaagcctccatgtcgagacttcccggcaaccgctccgcgaaattcgttccatacctcatccccggcctcatcggcctgttcgcggtagttgttgttccgttcatctggaacatctacctgagcttcacccgctggcgtggcgtcggtcccgtcaagtgggtcggcctgaaaaactggaaacgcctgttctccgattcgacgttctggatttccttcgctaactcgttctggatcatcgtggctatcgtggtcatccctaccatcctcggcctgttcatctcgtctctgctcaccgacgtgatccaaaagaagttcggcggcaaaaccgcttccttcctgcgcgcgctgttctatttgccgcagctgcttccggtggccgtcgccgcaatcatcatgggctggatcttccgcccggaggacggtgccgtcaacgcactgctcgccaagatcggcttgggtgcattgcagcacaactggctgggcagccctgacagcgcactgccgatcctcatgttcatcctggtgtggatccagctcggctacccgatcgtcatcttcatgtcgggcctgcagcgcgtcgatccggaactctacgaggccgcaggtcttgacggcgccaactggtggcagaagttccgcgtggtcaccctgccgtccatcatccctgaactgctggtggtcatcctcaccgcaaccatcggcgcactgaagaccttcgctccggtctacctgctcaccaagggcggtccgggcacctccaccacggttccgtcgtactactcctacaaccagttcttccaggtgcagcaggtgggctacggtgccgcaatctccacagcgctgactgtggtaatcatcgtcttctccatcgtgttcaccctcgtgcagaagcacgtcgagaaggaactcgtctgagagaaaacccgaaaaacaatcgcaagaacatactaaaaatccgaaaagcaaaggtgccatcatgacttattccatgtccacggccgccgcgcgcaaggcctcgaagaaaacgcagcacgtgcgttccgcaggtgactggatcaccctgatcctgctcgtcgccggagctctgctcgtcctgttcccgctgctcgtcctgaccgtcaacgcgttcaagacctccgccgattacaacgccaccggcccgctctccctgccgaagcacttcaccatggagggcatcatctccttctggactaccaccaacttcccgctgaagttctggaacagcttcatcatctccctagtggtggctgtcgcggcggtcgtgctgtcggtgctcaactccttcgcgctcggcatcggcaaggtcaagggcaacacctggatcgtgctcggcatcatgctcgccaacatgatgccgcaggaagcgctgctctacccgctgtacaccatgttcaagcaggtcggtctgtacaacaccaaactcgcgatcatcatcatcttcaccatcatccaaagcgcctacggcacctatctgctgtcctccgtatacggcacgttcccgcaggccatccttgaggccgcggccatcgacggcgcctctcgctggcaaatcctgcgcaaggtggtgctgccaatttcttggccgaccatcagcgtgctgttcgtgttcttcttcgtgtggacgtggaacgaatacatgattccgatggcgttcctcatgagcgatgacgtacagaccattccgctggcactcgccaccctgcagggccagcgcaccatggaagcgaccacgctggcatcggcttcgctgctaagcatcatcccgaccatcatcttcttcatcatcttccagcgcaagctgtcgcagggtatcaccgccggtgcagtgaagtaacgcgacccaacaacgctgggatgttgtgaaataacgcaaaaacagatacaaccggccgcggcggctttcagcaccgtggccggcattatcgacgcgcccactgcaagggggatctacgatagtcggcagtggtaggcggcgcacccatttccgcgtttcccaagctgtttaacaaaggagagaacaatgaatactatggcgacttccggtttcggcaacggtgccctcgattcgctagcaatcgcgacggaccacggccgtacacgttgcgtcaacgccgaaaacccggccggcggcaagggcactgcagccaccgccgccagcgcgctcggcccgtcacgtaagggcagcccttgcatccagacgatcaaggcgggcgattcggtcacgctgatggacgtcgatggcccgggcgtgattcgccacatttggatgacggtcaccgaccgcacttccccgaccggtccgaacgtactgcgcaatctcatcctcgaattctattgggatggcgaggagacgccgtccgtgcagtgcccgatcggcgatttcttctgctgcggtcacgcacaggcctgccgtatcaattccatcccgatcatggtggtgccaaatcgaggtttcaactgctatttcgccatgccgttcgagcacgcgcgcattgtgctgcgcaacgatcacaacgaggacgtgccggccttcttctaccaaatcgactacacggaatacgacgcgctgccagccgatgcgatgcgcttccatgcgcagtggcgccgcgaacgcgtcaccgaaattgcccgtgactacacgattctcgacaatgtgcacggccatggcgcgtacatcggcacctaccttgcgctgaccgcactggaaagccgctggtggggcgaaggcgaagtcaaaatgtacatcgacggcgatgaacagtacccgacgtggtgcagcaccggagcggaagactacttcggcggcgcgtggagtttcgccgacttcgacgagcatggccgcatgcgcgagaacacgttcaccggaccgtacctaggattcccgttctattcgcagcgtcttgccgcgcaccgcgaaagcgactactgggatgtggccacacccgtcatgcgcggcctgtaccgctggcacattccggatccgatttatttcgattctgacctgcgcgtcacctggcagcagatcggcaccgaggaagccggcaatttcgagcggcaggatgacgtcgcgtcggtggcatactggtaccagcttgaaccgcacacgccgttcgatccaatcggtgaccgtcacttccgtcagccccgctgatttacgattattccgctgatttacgccgatatcgccgtatcgtgcgttgacatgggaatggatatgttccgtctcgtgtcagcgtacgatacggcgattgtgttgttatgcgggcacagtaatcacattttcttcaagataacccgatgattttacaatagaaatgacgattgcggcatgccagacgcataccgacgtgcgtatagtaaaggcacaacagaaaaacaacagaagaacgaagaacaagaaaaacaacacaatagcgacgcaccgcacgatgtagagaagaaaaaaagaagcaagaaaccaggcggtcgtccgaaaggaaacatcatgaagaacaacgacactttcaaccagatcctcaactccaacctcgcttccatcgatccgggcttcggccagttcgcacttgccaaggcttccgctgatctgatgaagaaggtcctcaacaagtaagaccttcaagcaggaaggcaagccgaaccgcgtcaggccatctctttgaaacagaccgcgtgaggcaaggcaccgccgcagcgaacgctgcggcaccgattctcttctttccgattttttaaatcgcatagcgggaggccgcgattccaaccgaatcgcggcctcccgctttttcatacgcgcacatgcacccctgtcttgccggcaatgtccattatttgtgccacacaatcacgccaatacatcgctttccgtcaacttcgcacgaacttaacagcaacttaccagcgaacttaacagatgcgaagttgccgttaagttatgttaagttgtctggcaagttcggtggcgtatctaccgcacgccacctgcgcagcgcaaccgctacagttcctccatcgcaagattgcgggctgcggcgcgttcgcgggggccgcgcgtcacgtagaagccgatcgccacaattacgaacatcaccgtgcagcaggtccacagcacgtgactgccgaacgcgttcaaaatccagcctccgacaagcggcgaaaacgcgttggatagcgaccacaccaggttgtacaagccctgatacgtgccgcgtacatccttcggcgcgatattcgccaccgtcgtagcggcaatcgggaatgtgccaagctcgccgagcgtccacagcacggtcgcaatcgcgaacgtcacccacgaatcggcgccgatttggaacgcatagccaaccgcggtaatggacatgcccagcaccagcacacgggtgttgctcatccgctggaacagcgcgatcgcaggaatctgcagcaaacacagaatgcctccgttgatggtcagcaggctggaatattcgtccgtaccaagcccaatctgcgtcatcgaaatcggaagtccgctgacgatctggtaatacgccagcgtgtacaggaacatcagcaccaccatcgacatgagcgctttgtcggtgcaggcacgacgatagctgcgccaaatggagaatttcgattgctgcgattgagccgtttgcgcagtgccagaacgttccacaggttgttccacggaacgttccacggagcgtttcacagaccgtccgacaccgtgcacgcccagcccggcctctttgaagaatgccatcatcagcaacgtagcgaataccaacacagccgcttccgcatagaacatcagcgaataggagattttgacaagctggttggcgatgatcgggccgatagcgaagccgaaattcgcagcccatgtttgcagcgaatacgcacgcttctgcttgcgaaacggcaccacgtcggaaacgtaagccgcgaccgcaggcgtcggcatagatgaaatcgcaccgtatatcagcaacgtaatcgccataatccaaggattgccgatacaagccaacaaaaccagcatcaccgcggaaccgagattgccgataacaatcatcgcggggcgcccgaatcggtcagacagcgcaccaccgtacaggcagccgaaaataccgccgaaaccgtacatggagacgatggtgccggccacgcccgcgctcacatgcatgtcggagacgaggtacatggaaagaaacgacgtgacgaaacggcccatccacaggatgagcagcgtgacccacaagccccagaacatgacgggcaaaccgaaaatctctttgttcttctccattcttgccatcatatcgagcaatatcgagcagacgcgaagccgccgccttttcccggggtgctgggacaatggacaactatggcaatgaaaaaaggaccgaccaaggggtcgggcggaaagcatcgtaacgcgctgaagggcaaggggccgacccccaaggccgaagatcgcgtatatcacaaggcttacaaggcgaagaaggcggcggatcgccgcaagatggccgatccacgactggccgcacgccgtcgagcggcgaagttcacgtcggaatccgacgatctggtcatcggtcgtaacgcggtgcttgaggcgctgcgttgtggcgtgccggcaaccacgctgtatgtggcggcacgtatcgagcatgacgatcgcacgcgcgaaatcgtgcgtctcgccggcatccacggactgcatctgctggaagccgacaggctcgaaatggaccgtatcgcacgctcgtcgaaccatcagggcgtggtgctgaaggcgcaaccgttccagtattcctcgctggcagagctcgtggaccgcgccgataagaaggcgcgtgccatggaagcagccgattcggaaagcgcgcgcatcgcggcacgtccgctgttcatcgcgctcgacggcgtcaccgatccgcagaacctcggcgcggtcatccgttccgcggccgcattcggcgcgaatggtgtgattctgccggagcgccgttccgcttcggtcacggccgccgcatggaaggtgtccgcgggcgccgccgcgcacatgccggtggcacgcgtggtgaatctgaccaaggcgatcgaaagcctgaaggaacgtggctactacagcgtcggccttgacggcggcggtgacgcgctcgtcggcgaaaccggcttcgaaaccgatccgctggtggttgtgctcggctcggaaggcaacggcctgagccgtctggtacgagaggcgtgcgattccatcgccggcattccgatgtcgaatatggtcgaatcgctgaacgcctccgtggcagcgggcatcacgttgtatgccgtggcacgcgcccgtcgcgaggccgcagcagccaagtaatcgtttattacgatatttatgaaaaagctcaagccttgtggcttgagctttttcatatgccattaacggctaatggctccacaccgcagcgtccggatcatcgtccgggttgtagccgtcctcgtcggtgccgtaagtgtattcgtcatcgatcacgccggaatcggcctcggcgttcagcgcgtcgacatccttcgaatcgagcttgtactgcggcagcacgttctccacatagctcttcacggcttcggtcatggacacgtcgtggccggccttctccgcaaggaaccaacgatggtcgagtacctcatggaagaactgcgccggctcgatctgggagcggtattcgcgcggaatcatgcgcacggtcggctcgaacacctcgcgcatccagtcggtggccacgatttcgagatcctcgccatcacgccacgtggaggtgcggtaggcgtccagatcgttgagcagacggcgggcctggttctcctgcacgtcaagaccggtcagtcgcagcagcttgcggttggcgtagccggcgtccaccacgcgcggacgcaccagcacgcgcttgccgtcctcggcggtcttcatttccagctcgtccacgtcgaagcccagttcgttgagcttattgacgcgcttttcgatcttccacatctcgtccgggctgaacttgtcggtgtcggtcagcgcgctccacagcgaatggtagcggtccaccaggcggtttccgatttcgatttcgtccacgttgctcggcagcaatgcgccggaagacagatccatcagttcgccgatgatgttcgtacgggccaaatccacatcgtattcacgctggccttcggtgaggttcacctgcagatcgccggtttcggcgtccaccaggaacgcggagaaagcgtcggcgtcacgcaggaacagcacgttagacagggacacatcgccccaatagaagccggccaggtgcagacgcaccatcagcacggcaagcgcgtcgatgagtcgttcggcggtgtcgggacgcaggttgcgggcgaacagcgcgcggtacggcagcgagaatttcagatgcttggtgaccaggatggcttccagcggctcaccttgcgcattatggcggccggtgaccacggcgatcggctgcacggtaggcagttccagcttctgcagtcggcgcagcagctcgtattcgcgttccgccacgttgcgtgtgatttccttcatggcgtagacttcgtcgcccacgtgcacgaaacgcaccacgtgcctggagatgcctcgcggcaggttgaccagcaggtcctcaggccatgttgccagcggcttctcccacggcagcgtgaacatcttcggattcgaactcgcggcggtgatcttcaacgcctgcggctccgggctctgcgctgcggggtcctcggccttcacggaagtggccttaagcacacggggatccatctgtggcaattcatgtgattccatagctcttcaatttacccgctgacctacccacggcaggcggcaaagggactacgagtgtcacgatgagaacagcgggaaaagaaaagccccgcaccaacgcggggcttttccaacgagacaataagagaggaaagagaatgtctcgtttaatggttgacggacgtttgcacatccgccaagtattggttcaaccacccgccaagcgttccataaggaacgcccgacggttggttactcgttatcgtctcagttcagacgcagctcggtggacggagcgaacaggtgcatcttggacgggtcgatcttgatcttgacggtatcgccgaccttcggaagagcacgcgggttcacgcggatcgtggtgagcttgttctgatcggacatcatggtggacgcctcagcagcggagccatcggtgatgatgttgccgtagatgtagccgtcggagcccagatcctcaacgttcatgaccttgagggagaaggcgttggcctcatccggggcagccaaggaggcgtcttccggacggaagccgaccacaatctggccgttgtcttcggcggtgagcttgttgacggcctcagtcggcagatccacggtgtcctcgccgatctttgccttgccgttgaccaccgggtgggtgttgatgttcatcgacggggagccgatgaagccagcgacgaagacgttggccggacgatcgtacagctcagtcggagcgccgacctgctgcagaatgccgagcttgatgacggcgatacgatcacccatggtcagagcctcggtctgatcgtgggtcacgtacagggtggtgacacccagctgacgctgcagagcggcgatctgggtacgggtctgcacgcggagcttggcgtcgaggttggacagaggctcatccatgaggaagaccttcggctcacggacgattgcacggcccatagccacgcgctgacgctggccaccggacagagccttcggcttacgatcgaggtactcggtcaggtcgaggatctcagcggccttctcgacgcgcttgcggatctcttccttcggggtgccggcgatcttcagggcgaagcccatgttgtcggcgacggtcatgtgcgggtacagagcgtagttctggaacaccattgcgatgtcgcggtccttcggctgcatcgtggtgacgtccttgccaccgatgaggatgcggcccttgttgacctcttcgaggcctgcgagcatacgcagggtcgtagacttaccgcaaccagacgggccgaccagcaccaggaattcgccatccttgatgtcgaggttcagatcatccacagacggcttgtcattgcccgggtagatacgagtaacatggtcgaatacgacttctgccatgatttgtcatcctttcagaggcaggtacgtgcctcacgatccgttgtaaagggatttttgttcggtgcccatcctcgcggcttactactttgacaaagccacaattcaaagcgtttacttatttggtttggcgaagatctcttcgttgagccatgacctactatacacacccaaaccgaatcgtcaatgcgtgtcgcgggttttcaccgctcaaaacagtctattagggggttatcatcccctcaaatcgatggtttttcatcacaatatcctcattccgcgagagaatggacggtagtctgaacggtgagacgtggaggttcatcgtgcgcaatatccgaatcggagtcgtcgaggacgaccctgcaagctgccaattggtactcgattacctcaatcgctaccaaagcgagaccggcgagcaattcaccgtctccgtattcgacgacggcgcgcgcatcgtggaaaaatacagccccgtctacgacattctgctgctcgatatcgaaatgaaggaaatggacggcatggaagccgcccgtcgcatccgcgagcgcgacgacaaggtggtgatcatcttcatcacggccgcgccgcaatacgccatcagcggatatgaggtgcgcgcgctgtcgtacctgctcaagccgctgccgtggttcgcgttctcgcaggaactgaagaagtcgatcgacatggtgcggcgcaatgacgacgattcgatgcttatcgacaccggcaaagggcagatgcgcctgaatctggcggatattctgtatttggagtcgattcggcacaccatcgtcatccatacgcttgacggcaagctgtccatcaacggcacgctcaaggatatggaagctaagcttgccgactaccatttcttccgctcgaactcctgttatctggtcaatctcaagcatgtgacgggcgtggcggatcaggattgcatcatgtcgaacggcgagcagctgcgcgtgagccggccgcgcaagaaagcgtttctgacagcgctgaccgattacatgggcggcggcagatgatcggggcgatcgcaggcatcgcgcatatcgcaaatatcgtgaatatcgcagatgccacaaatgccgcacacattgtgcacgtgttggcggcgtcggtaccgtcgacggtgccggtcacccacaccttgcccgacattccccgttcgtataccgccatctgcgaatgggcggcgtgcatggtgtacatcgcggtgctgtaccgacgtgtgccgttgcgtcgttccatcatcgtcagcgcggtcggtctacccgcgatcgtcgccgtgcagtatttcgacggcagtatgccgatctggttttggatcgtcggcatgctgctcgccttcggctgcatgtacctgacgattctgttcggtgccggcaccggcaagcgcgaagggctgtacatcacggcacgcgcgttcgtgctggcggaactggtggcgtcgctgcattggcagatcgtcgcgttcatcggcacacatgacgctcaagccacttcatacggtgtgcaggccatcgtcatgctcatcgtcatctacgcgctgtgtttcggcctggcatggctggtggaacgcggcaatttcagccaaaccacacccacgctaccgaccgcctccgcggcaaccgcgacggtggccatcaccatcgtcaccttcgccatgagcaatctgagcttcgtttcgaccaatacgccattctccggttcgatgggccaggaaatcttctatatccgcacactggtggatttctgcggattcgcgattctatacgcgcaacaggagcaggctcggcgcattgaagcgagcgcggaaatcgcgtcaatcaacgcgcagctggaaagccagcatcaggagtacctgcagtcgaaggagaacatcgaatcgcttggtcggcttgcgcacgatctgaagcatcagatcgcggcattgcgtgccgaagtcgatcctgagcacgcggcggcaggattcgagcagctggagaagtcggtgcagcgctacagcgcccagcagcataccggcaatcccgtgctcgacgtcatcctcaccacaaaagagcgcacttgcgccgatcgtggcatcacgttcaccgccgtggcggacggctcgctgctggacggtatgtcgtcgatggacatcgcatcgctattcggcaacgcgctcgacaatgcgattgaagcgacgttgaaactgccgaatccggaacagcgacttatcaaactggctttgttcgaacaaaatcactttattgtgattcgcgttgagaattattacgattcccgactaagcaaagacgccgacggcaacctgcgtaccacgaagcgcgacgaccagcatcggcatggtttcggcgtgaagtcgattcggcacatcgcgcagcagtatggcggcgaagtgacgatccgcaccgacaaccactggttcgtgctgaccgcgctcatcccccgccgcaccggcctcatggccatgtaggaggggtacgcagattaccgcttgacgggggtacttggacgtggcaaatgcagggcggctaagggggcggccaggcgggaggcggtgaaggcgctgacggctacggcgaagccgatggggacgaacaggttgatcggggcatcggccaattccatcactaggcagatcgccatcagcggagcctgctgcgaggcggcgagcagcgcgcacgcacccagcagcgcgtacatgccgatcgaattcgtatggaacatctgcatccacagaatgcccagcatcgcaccaccggacgcgcccaacgcgatgcccggctgcagcacgccgccggacgcgccggaacggatcgtcagcaaggtgacgatcgccttggccacaaaagacagcagcagcaccgggatgacggccagatcggccttcgaggagaaacttagctgcgcggtggcgcgaccgttgcccatgacctgcggcacggcaatcgccacaacgcctgtcaataggccagcaagcggcatcatccacagaatgcccgctccagatggcttgttccgctccgcccactgggagccgcggcggaacagcgcgccggcgacgccaagcatcaggccggcaatcagcgcgaacagcatgtaatcgggggtaaacaggccgtccgctttgccaatcaggtagaacacgtgcgtgcctttgaccaggctcgccacccatgaggcgagcgccgagcaggcgaacgcgagcgtgaccgtctcgagcgtcacgtcggcgagcaggatctccaccgcgaagaacgtgccggcgagcggcgcgttgtagactcccgcgagaccggccgcggcggtaatggccaccagcatacgcgtgtccttcgcgccgagacgcacccagcgggcgaatcgttggccgaacatcgcgccaagttcgcgaggcgccacttcgcggccgatcgacatgccggtaccgacgatgaagatctgcagcagcacatgcacgatggtctgccagaccggcatgattgcgccaccgacggctttcttgacggatggcacttctgtggtacgcgtgcgcagcagccaccacatcacggccgcgatggaggcgccgaccgtcacggagatcgcacgacggatggcgggcacgttgaacggaccggattcatgcgcattctcgatgtatccaagcgcgaaacgttcgacctggtacagcatgagcgtcagcaaacctgcggccgcgccgatcgcgatgccgacgacggccaccgccgcgatcagcgccggtattctgccgattttcggctgctgttccgcctcgtcctgcgattgatccgacaccattgcctctctcacgttgtgtgtacctcgtctccagtccgtctcgtcatacgtgttaccgcatcaccatcgttccaccgacggcggatttattcgccaacatcccccaccagaacatgaattccaatgtcagtcacacaacttgcgtctgcatagtgaacggccgatcaggctcgtcgtcctcggcaacaaggccggccacatccgccaaacaccataaggcgtacagcggcagattcatcggcggcaaatatattggaatatatagcattcaagacacaagatgcacaaaatagacaatttcaaaggcttgtttttgcacaaaacagacgatttctgccacagccaaaagcaaggaaccggacctccaccatacctttcaccacccactgccagtaccgccgtggtgcccggcgaggcattcggcgaggaagggcagggattcgtgcgattgtcgtacgccggcgatgcggatgagttgcgtaagggactgcgtcgtatgtgcgattttgcggagaggaatcgctgacgccgtcaggtgcatgcccgtccttcgtcgcgttcacccactttattgtgtatgtttacgatttgtataatcgtaaacatacacaacaaaatcatacgatgaaacggcggcacgttggacgggggatggactcctagctattcgaatgactagccgtgcacaatagcgcgtgaagtcggagcccatgacaacatctacactgtcatgagcgcataggcaatccgccgttcgacgtactgacgaaatagttgggatacttgtctgaatcgtaggttgcacatatgtgcaactcctagactgttcgcgctagatacaggcatacagtattcgtatcatacgcaaccaaggtggtgacatatgctcagcgaaccggtgaaagcattatttgagtccaacaccaacgcccgtcatgccggcgacgcagacagactcgccaaagagcataagccgaacggagtgcatgtactgacggatctcccatatggcattccggaccaactgcgcaaattggacctgtatcgtccggaaacacaacatgaacctcttccggtcatcatcgacttccatggcgggggtctctaccatggcgacaaacaaaataccatgtgtcgcgatatgtatttagcgaagtatgggttcgccgtggtcaatgccaactatcggctggtcccgcaaattggattccaaggccaactacacgatgcgcttgacgcaattatctggacgaatgagcacgcgcatgactatggcatggatacgaatgctctgtttctgattggagattccgcggccaccctgcttatcttgtacctcaccgccgtactccattcaccggtcgtcgcgtcacagcttggcatgaaggaagcctgcggaaccgcccgcatcctcgccattgcaggatgcagcggcatgtatcgcttcgagggaggcgtgcatggaactgcaatgggatactatgcggaaggctactttccaacgctgaaggaacgaattcgcatctccccctatcttgatgtcgatcgccttgtagttgatggcaatcttccgcccttctatctgcagaccagcaccgaggattatctcgcggacaacactctggaattcgcaagaatcctgcaataccgccatcatgattatgaactgcgattactcccgaaaggtcttgaccacgctctcgtacacgacttcgcagtcaaggaggtcggcctggagcataatgaggaatcacagcaaatcgtaaaagaggcggcgacgttcttcaaacggtaccgcccaacgaccagctaggaaaggacgctatggaagaacggattcgctccacccgctcctcactggcagtattcgtaggctgctgcgccatgtccttcatcggcttcgctctcatcaccaacacttcagggctgtatttcgacgccatcagccgtgatttacatgtgggtcgagccaaggtcagcctaaccgtatcgattcgattgatttgcagtgccatctccatggccgcgttcagtcgcttttcacatcgcattcgcttgcgccccacacttatcggctgcattggtatctgcgccgtgggattcctgctttgcagtcgggcgtatgccctctggcagttctatctcgcattcgctgtgatgggactcgcctatgttattccgataacgctgatgccacccattctgcttgcggcatggtttcccactcatttcggcacggtccttggcataaccggctgtttgtcaggattgggaggagccatattcaatcctctgatttcgcacgtcatcgcgtcatatggatggcgatcggcatatctactgaccggtgcgatgctgatggtgctgctactcccctgctcctacctgcttaaaccatatccacatggcaagctcgacactgcgtctgccccaaacgccaaacctgcgcatgatacacggacgaaaagcgggcatctcatcggcatgcttcgttcaccggcgtttctgctgctgtcagccgccatgattttgttgcaaatcgtatccggcatcaatcagcatattcccgcgtacgggatttccatcggactcacgcttacacaggccgcttgggtggtcacggcccgcatgattggagccagcgtcggcaaacttgccataggttcgacgctggaccgtgtcagaccgcaattcgcaatcacgctgtttgccgccatcggaaccacaggatggttcagtctgcttttcggagccaatatggaagttgcgatcactgcaagttttctggcgggaatcggccaatgcctgctcatgattgcacttccctggagcatacgccgcgtattcccgggagatgattatgcccgcgcgctgtccgtcatcaacgccaccggccagctgaccgtagccatcgctaccacagttcatggattgattttcgacatgaccggcggatatggagcgtcattgacgctcaacgtgctgttgtacgtgctggcagcaattgcaatcatcacggtggcgcacgggcatacccaatccttccagcatcctaacggtgattagtccatatccaataacaactcagccattccctgattggtagcgagtgccgacatcagtccaccgaccaagcatgcgtgcagtgcccgcgcacgccacgtctcccaagcgactccaatgaccaatggaatgtcacgaaaccgttcgaaatcgatgctgatggtgcgctcacacagactggttcgcacatgattgccatgcatatcgatatgatgtccgcaaatatgcccgaccactcccttttcctgcaactcccgtgctactgcagcgtcttcgaacgaatggaaaatcctcccggaatgcccctgccgaatcgctcctacaccgacaatggcgatatcggctcggttacccaaagccaaagtcatggcaatcagtttctccgaacgcacagcctgcgcaacttccgcggattccataatcaacggtgcaggaagcaacgagtaagcgcatcccagacgttctgccatcattcggcagatttccggagaatcagtcaacgagttggcggaagacaacgaacccagcatctgagtcacatgcgcacgagggtagtcaaggggaggcaaagctctgattgtcgccgccatcggcgtcccggtcgatgtaacgatcaacgaatccggtttgaggttttccaccagcagctgcgccgcacattgaggcactagcgtcgatgcgatgctgtcatcgtatgaatatgcgacgcgtaccgttttcaacccgtatttgttccgaagattctcctcaagggattgcaatcgttgcaatgggtgcccgatggtaatctgtacgattccggtttcccgtgcttcggtgagcatgcgtgacaccgatgaccgcgaatagccgacctctccggcaatctgcgattgattgagtccctcgtcataatacatctgtgatacacgaatcagcttttcgatatgctgtctggtctgcatcgacgaaagcgcggaatctttgaacatatgtgcatgttatctccagtgtccatacgaacacgcgcgataagcatacgttttaagcccatcatcaaccgatactccggtaaaccagcagtgtggcgaactgcacatattctcattcacatcccaatgtcatttcatcctcaaattagtctataaccggctccaggaagaaccgggccccgcgttaccgaaggatgatcttcgggtgacgcggaaggaacagagggagaaaaataccatgtcgaaagtatggcaatacttgaagcagcatgcgtatggcgcactcaccatcgttacggtgttgttgtgcattctgggcagctgcatcgcgaatctggcacagacggatttcggcaacgtcaccaaagagaatctgaccatcgaaacatcatccggacataggctcggcatcaacatgctcaagcccaagaccgccaccaacgacaagccggcacccaccatcgtgttcgcacatggcggcaacggtctcaaggaaaagtgggatctataccagatcgaatgggcacgtcgaggcttcgtcgtgttctccttcgatctttacggacacggcgactccgagattctgaacaacaccgaatggctggtcaacggccgtggcctgtatgacacggtaaagtacgcgaccacacttccattcgtggacaaggaccagatcgccgtatccggccagtcccgcggaggcaacaccattcacgagacgatccttcttgacaacaaggccaagaagcagctgatcaaggccgtgctgtacgtcagccgcgacgccgtctacaaagacaacgaaactcagtcgttcggctatgtgccaggcaagaccacttcagcccaggccgcctccaagaataacggcgagtactttaattattacggcaatcgcaatgtaggcatcatcgccggcaaattcgaccagtactccttcaaggagaccgacaagacgaccggcaagatgctgccgaatccggactatctcaagcacaataacgccaaatcgttcctgaacttcggcatcacgcctgactcttcgactgcggacggcgtcagcggcaagtactatacgaagaaggtcgatggcaaggaagcattccgtgtcatctatctggaaaacggcttccacacttcgcagctcttccagtcgtcttctaccgcagctgccatggagttcatggtcaaagccttcaatatgaacacctcgttgcagtcgggcgaccagatctaccagtggcgtatgatcggcagcaccatcggtttcatcggcatgttcatgttcgccgtgttcttcgctctgtggctctcccagatgccgctcttcaggggaacttctcgtggcaatgccgtcatgcgtatcgcggaatcgcatccgggaaccaaggcttgggcatggggctgccttatcgtcaacaccctgttcgccaccgtcagcacgttgttcctgtactacaacggcgtcgacacccatatcggcacattcttcaggcaggggcaggcactgttcgcaggctccatgctggcgatttcctctgtgttcaccgccattgtcacctacatctggtaccgctgcttcgctaagaagaatggtatgaacatcgatgaaatcgatttgaagacatctgctttcagcgtgttcaagaccatcatgctggctctcaccgtcaccggcggcactctgctgttggtctggggagcgcagtacttcttcaagacgaacttctcgttcctgtactggggcatcatgccattcggctccttcaagatcgtggacatgcttaaggtactcccgatcttcctgattggctacgtgatttcctccatcttcatcaactgcatgaactacaacacttcctatggcaagaacaagatcgtgaacatcctggtactcgctctcgtcaccgccgccgtgccggcactggtgtccggcgcaggctgggccaagttcatgctcaccggtgtcaatgacctgttcggtgcggcctacacccgcattccggacagcatgttcctcaccgtattcctgctgtttatcactccgctgacggctcgcggcatctattccaagacccgcaatccgtacctcggtggcatcatcaacgcgattttggccatggtaatcacctgcgtgaattgccaggtcgttttcccggcctgatcgctagatagcacggcatgacaaagggtggtggctcatcgactgagtcaccacccttcttatttgcaaggtacgctacgccttccaacgacatcaggcgcgaagcaggcatggaaaacccgcccggaaaatccgggcgggcaggaagaaaggaattcagaatagggctacttggcggcctcctcgcttttggccgtctccttggacccgctcttcggcatgacccagaacttgagcagcggatagctgacgatcacggcaagcaaggtgttgaccacggatgcgatcgtgcctgcgatgccggcgttcatgccccatccctggcacagaccggtcacgtagcccggcagcacaaggttcactaccacgatgatcacggcgaggatcacatacttccaagcggcgtccttgaagctggagtcggacttgaagacccacttcatctgcacgaagaagttcaccacctgcgcaagcacctcggcaagcaggaaggtgaggaatccgcccaggccgttgcccttggtgtcatagttgaagatcaggaagtggaacggctgcgtgagccccaagccggagatgaaaatggcggtgccgatccacgtcaccacgaaacgggtaatggtggagatgttcgacagcacattgaacaggatgaactcccagatattcggatgatccttgatccactggcgaatcggtccgaccttcttatcgccggcagcggtttcggccggcttcgcagcattgttctcagtcatggttcagctcctttgcggtgcgcttgttggcggattggttgcggaagaagccggcgatcacgccgcccaatccgcggaaagtatgcccgttggcgatgttcacgatggcgtcgaccatcgccgagtcgaccatgccttgggtcatcttgctcatggcgcgaggcggcatgttcaggatgaacagggtgttcagatccggcgagccggtcttctggcggatcttcgcttcgcgcttggtcagcgtcttggcgacggtacgcgccacgaagcccttggaatccacccacgacatgatcggatcgttgacgccgaacgtcgtcggcttgccgggggcaagcacctcatggccgaacagcacggccatttcggcgtcggtcacatccttgacccggccggtcagatagtggccgagcgcgggatcggcggcgcaatcggcggtcgtgcaatcgccggccacggtgtgaggaatcgcaagcggcagatgctcggcattgtcgccgaccagcagcgtccattcgccgctttccgtcttccatgcattggcggcaacatcgaaatggcggaacgtgtagcggtcgaaatcgatgtgcacgctcttgctttcatgcgctgccagctcgaccttgatgaagcccttcagctcgcggtcgggatggagcacgccgccctgcggcgcgcgcacatacaactgggccacggtggagccggcgacatcggaatcattggtgacgacgaaatccacgccggtcgcggtggcggtgatcgcgctgtacgtgaacgtggagtagctcagtccgtagccgaacgggaagcgtacgggcacgcccacggtctcgtaataacggtagccgacgaacaggccctcgcgatagatcgcgtcacgcccgatggccggataccagccggagctcgggcaatcctcgtattgcatcggccaggtttcggccaaatgtccggatgggttgacttcgccggtcagcgcgcgcacggtggcggaggcgccggcctggccggacaatcctacgtacagcatggcggcaacatcgttgaaccacggcaattccaccggggaaccggcgacgagcacgatcaccaccggtttgccggtcttcgccaacgccgttacgagatcgttctgcgcctgcggaatcgccatggtggagcggtcgaggccttcggattcgctgcgttcgtcgaggccaacgacggccaacaccacatccacggcgtccttcttggcgagcgcgacggcgtcgttcagcagcacctcatccggcttgccttggcggtcgtagccctgctcgtagccggccaataccaatccttcggcgttcttgacctcgtcgaggatgttctcctccttggtggcgttcaccttggatgagccggaaccctgatagcgtgcggtcgcggccatatctccgatgacggccacgcgagtgcccggcttgagcggcagcgtggcggcgtcattcttcagcagcacgctggaatgttccgcgaccgttctggcgatatcgtggtgcgccttcgcaatatcgtccgacaacaaatcgtcgcggccgacgccgacgagcttggtcgccgccgcgattttggcgacttccgcggcacgcttgttgatgtccgcttcggcgagcgtgcccgctttgaccgcgccttccagctcgcgcacggaggtgaaacctggcgacggcatttccagcgatccgccggctttgacggctgcgacggcggagttggagccgccccaatcggagacaaccatgccgtcgaagccccattcgtcgcgcaggatctcctgcagcagatgcttgttttcgtgggcgtagacgccgttgacctcgttgtaggaggtcatgatgctcatcggcttggcctcgcgcacggcgatttcaaaaccggtcagatacaattcgcgcatggtacgttcgtccaccacggagttgctggcctggcggcgcagctcctggctgttgactgcgaaatgcttcgggcatgcggagatgccgttgctctgaatgccgcgaatcaggcccgctgccatacgtccggcgacaatcggatcttcggagtagtactcgaagttacgtccgcacagcgggttgcgcttgatgttcaagcccgggccaagcagcacgttcacgtcaaggtcgtgagcttccttgccgagcgcttcgcccatctcttcggcgagcgccggatcccaggtattggccacggtgcaggcggtcgggaagcaggtggccggcttggatgcgccgatgccgaggtggtcgccttcgccaagctgcctgcgcacgccgtgtggaccgtcgctcataacgaagccgggaatgtcggcgcgatcgttaccgcgcgaatcccattcggatccgccggacagcatcgccgccttttcaacgatcgaaagatcttcaaattccatgggttctccctcgcactaggtgttgccaaaacccgctttgccgagcctgccctgtccgcttcgcccgactgcgctgttttcttgcgatttcccgctgccgtaccgcgctgcatcgcaccgtgccgcacgcgggatttcgccgctagtttgattgaaccagcttttgcgatgccgtcaccgccgtattacacaacctgtcgttttgctcgcacaatcggcatatgggcgcggtgaagagggtatgcggtggcgcagaacgcgcataaaatcgcatcgttccattttgcaatcgatggcaagcgtttcgatatgcgcatatcgttgcaatttcaagcgactcgccgatattgatacctttttgcgcaagcgctatcatacttaacgaaagtaagttttgctaacttttcttcaatgcggaacatgctttgatcactcaacgcggagagcgatgtttcgcagcgcacagaaaggataatgagatgcgcgaccagcaaagcagcgacacgagcatcgccctggacgccaatacggacgtccagcaggaggccgataaaccggcagtcaagtggaggtacctcttcggcttcctcgcctggaccgtgcttaacgccatcgtcatcgcactgtgcgctggcgcgtcggtcttgaccatcaagcgcatcaagtaattcaaacgggaccgtaccgtcgcatatgatgacacggtcccaatccagttctcccgatttttcccacactcaaaggagccccacatggtagacagcacactgttctcgctggccacgctcaacgcccatccggcaatgaatccggattcggtgatccagggcgatcattggcgcatcggcctcatcacggacgcgctcgtccgtttcgaatggtccgacagcggccgtttcgtggatgacgccacgcagatggcgatggtccgtgatttcggcgaaaagcctgaattcaccgtcaccgaacgtaatggctggctggaaatcgacaccccgtcgctgcatatctcctacaaccagcgcaagttctctccggaaggcctgtacgcaaccgtcaagcacgtcaacgccatcgaaaacacttggcattacggcgacgtgcagcgcaggaacctcggcggcacctaccgtacgctcgacgaggcgaacggccgcatccccgtcgatccgggcgtcaacagcaccgacggttgggcgatcattgacgattccaagtcgaacgtgatccgcgaaaccgccgaagtgaacggcaaccacaacgatttcggcacgtgggtgaccccgaaggaagagccgaccaccgacctgtacctgttcggctacggccaccgctaccgtgaggccgtgcacgccctgtaccgcctgaccggcccgaccccgctgctgccgcgcttcgtgctgggcaactggtggagccgctaccaccgctataccgaaaccgaataccgtcagctcgtcgaacgtttcgaaaaggaaggcatcccgttcaccacggccgtcatcgatatggactggcacctggttgacgacgtcgacccgaagtacggctccggctggaccggctacacgtggaacaaggacttcttcccggatccgaagcgcttcctcaactggctgcacgagcatggcatgaaggccacgctcaacgtccacccgagggacggcgtgcgcgcgttcgaagagctgtatccgcaggtcgccaaggccatgaacatcgatccggaaagcggcgaggccgtgcagttcgacctgaccgatccgaagttcatggaggtctacttcgaccagctccaccacccgatggaggaagatggcgtcgacttctggtggattgactggcagcagggcggcctgacgcgccagccgggcctcgacccgctgtggggcctgaaccacctgcattacctcgattccgcccgcaacgacggcagcgactacagcgaacgcaacccgcgtccgctcaccttctcgcgttacgccggcccgggctcgcaccgctacccgatcggcttctccggcgataccgtcgtgacgtgggagtcgctgaaattccagccggaattcaccgcctgcgcctccaacatcggctacggctggtggagccacgacatcggcggccacatgttcggttaccgtgacgaggagctggaggtccgctggtaccagctgggcgcgttcagcccgatcaaccgtctgcactccaccgattcgccgttcaacggcaaggagccgtggaacttccacggcgatgcggaacgtgcgatgacgtccgcgctgcgcctgcgccatgcgatgattccgtacctgtacacgatgaaccgtcgtgccgcattcgacaacgagccgctcgtgcagccgttgtactgggattatccggaaatcgaagccgcatacaagctcaccgacgaattccgtttcggcaccgagctgctggtcgcgccaatcgtcgatcccgccgagcgttccgtgcagcgtgcgaaggccgatgtgtggctgccgcagggcgaatggttcgatttcttcgacggtcgccattacacgtctcgtccggccgaaggccgccgtctggaggcttggcgcgatctcgaccgcatgccggtgttcgctaagcccggcgcgatcgtgccgctgcagatgcccgccaagggtgaggcgctcaactccgtggccaacccgcgcgcactgcaggtattggtgttcccgggtgccgaaaacagcttcacgctgtgggaggatgacggcgcagcacagagcaaggatcgttgggcatccaccgaaatggcgctgcgttttgagggcgattccgcacagttctcgatcgctcctgcggaaggcgcgacggacgtcattccgagctcccgcgattggacggtcacgttccgtggcgtcgctccggaagcgatgcgcgccgttcgtgcgaccgtcgacggctctgccgccgctccggaagtcgcgtacgatgcggagacgctgagcctgaccgtcacgctgcgtgacgtgccgacgagcgccgcaatcgccatcgatttcgccgacggtcttgccgttgcggacgatccggttgaagccgacgcgttcgccgtgctgaaggatgcgcagatgctgtacatgaccaaggagcacgcataccgcgcgatccgcgagctgggcaaggatgcgctgccggcactgagcacgctggaggatctgcacggcgttggcgcgcagaccaaataccagtcccacatgccgcagccggtcatccaggccctggccgaagtgctgacccgcaactgacctcatcgcaataattcaaaataaaacgcgtgcgcgtccggatggtttccgcccggacgcacacgcgttttgttttatgtacgaaattacgcaacgcgctactgttcggtggcacatcgccgtttacgactttggctgctcttatcattccagccatcgcaatcggactaacagtggccagtctgcaatggcttcccaaaggattgtatctattgctgatactgggcttcggcatagtggtacaactgcaaataccactgttcgaacatgcgctaaaaccctatgtaaataaggtggccgcatagcagcaagcaagtttccaagcttttgagcaaatacaataaagctcaatctttcgggcggtagcagtgctaccgcccatttacgttttcattcgcatttcgtatgaaccgcatgacacttttctctttaaggcatcgaggtggtgacgttttcttggacttcccgaccgggaggagaacccccttatggcgaagtgcagcaaggagcagcgcgacagggccgtggacctgtacatcaaatacgagcgctgcgccgcggacgtggattggctacaatgtattagaccctcagatgagggacgaatgacgtgggattggaggccgacgatggtcgacccgaaacatccccgccaccacgacgaggcgttcaaacggcagatcgtgcagtcgtgcgagagcggcaagccatcccgggagatcagggccgagtacgacatcgcgcgatcgaccccgcggcgctgggtccaaggcatccgcgacagcggctccgcccgggccgcggacaaccgcacgcccgggcggaacgaaccggtcgagccggggaggcgcaacaggcggttggagatggaggtggacgtttcagaacaagcggcgccggtattcgcacgaaggcaggcgtgatacgggccaacgccgcccgctacccgatatcggcgcgatgcgggatactgggcgttccccgctccacctgttactggatgaccgggcatcccgggacggagcgtgcggatccgatcgccggcgacgtgcgcgcggtccggcgcgacggccgcgaacgctacggcgccaggaagatcaaggccgccctggaaaggagggacgtcaccgcgtccaggagacgcatcggcggcatcatgcgcgaacagggcatgacgggcgcgtacgcgcgcggacggtccgaaccgcacaggacgcgggtcgacgaggccgggctcgcgagcctgctggaccgcgggttcgacggctacgccccacgcacgcatctggcgggcgatcttgcctatgtccgcgtcggcggagaccgggcgtacgtgtgtccgctggccggcctggcggacaggggcatcgtcggccattccgccggacggacccgggacgcaagcctggtattgggcgcgttcgccaccctcgacttcccgccggcggacgtccagaaaacaggggtttgccggccggaagggtccgcaggcccctcttcccgtattctgacgttaggagacaacagcatgcaggcggatcgtgtgagagagacggaacgaatcaacgacgcgttcctcgaggaggtcgtgccattcgcggtgcacggcgccacaatcgtcgacgcgcgtggaatgacgaaaaacggttggctcgtttccgacggacggtcgatagtcgaaacgggatgcgccgaaacggacttcgaaacggacttcgaaacggcctgccggctggtccacgtcgagcaagatcatattgttaacgctaacggaatggtgatgacgcccggatacgtcgacatccactcgcacggcgcatggggaagctcgttcgatgacggcgagaaggggatcacgaccgcccgagccggacacatggcgcacggaacgacgagacaggtcctgagcctcatcaccaatcccatcgacgtcatctgcggtaacttgaagacggtccacgacatgatgccggaccgcccggatattctgggcgcgcacctcgaaggaccgttcctcgccatgtcccggaaaggcgcccatgatcccaattgcctagtcgatcccactccggatctcgtatccagaatgctggacgccgccgatgggtgtctcagacagatcaccatcgcgccggaacttccgcatggaatcgacgcaatccgccgtttcttcctggccggagtggttccggcggtcggccactgcgatgccgactaccagactgccagaaaaggattcgacgccggagccggaatcatgacccatatgttcaatgccatgaacgggctgcaccaccgcgaccccggcccgattccggcggcagtggaggatccgagggtcaccatcgagcttatcaacgacggattccacgtgcaggatcccatggtcaagctcggattcgggcttgcgccccatagaatcgccttcgtcaccgacgccatggccgcgaccgactgtccggacgggcattacctcctcggggctctggatgtagatgtgcgggacggtcatgccagactcgcctccaatggagccatcgccggttctacactgctattggaaaaggccgtgtctcgcgcggtgctggagctcggcatcagtccggtcgacgcggtggaagcggcgacgctgacccctgcgcgggcatttggcttcgaccgtcgaaatgacgtgacaggcttcccgatcggtctgctcgctccgggattcgcggccgacgtgctgctccttgatcaggaaacctggacggtgcgacgcgtctggtgcaacgggcatccggtgagataattgatttcaaggttcaatgacgaacgaaaggaacaatgacaatgaaccaacgtagagaacatcgttggcctcggccgttggagggccggcgggcccgtatctggtacggcggcgactacaatcccgaccagtggcccgaggaggtctgggacgaggacgtgcgcctcatggtcaaggcgggagtgaacctcgtatccgtgggcatcttctcctgggcgaaaatcgaaccccgcgaggacgtgtacgatttcggctggctcgaccgaatcatcgacaatctcggcaaggccggcatcgccgtagatctcgcttccgcgaccgcatccccgccgatgtggctgacccaggcgcatcccgaggtgctgtggaaggactaccgcggtgacgtgtgccagccgggcgcgcgccagcactggcgtcccaccagtcctgtgttctgtgagtacgcattgaagctctgccgggcgatggcggagcattacaaggacaatccctatgtggtcgcttggcacgttggtaacgagtacggatgccacaaccgcttcgactattccgaggacgccgaacgcgcgttccaagactggtgcgaggaacggtacggcacgatcgaagcggtgaacgacgcatggggtactgcgttctgggcccagcatctgaacgatttcagcgaaatcgttccgcctcgattcatcggcgacggcaatttcatgaaccccggcaagctgctcgacttcaaacgcttcagctccgacgcgctgaagtcattctatgtggccgaacgtgacgcattggccgaaatcacaccagaaaagccgttgaccacgaatttcatggtctccgccggcggttccgtactggattacgacgattggggcggcgaggtcgatttcgtgtcgaacgaccattacttcattccgggcgaggcgcatctggacgagctcgcgttctcggcttcgttggtggacggcatctcccgcaaggatccgtggttcctgatggagcattccacctcggccgtgaactggagaccgatcaactatcgcaaggaacccggccagctggtgcgcgattccttggcgcacgtggccatgggagccgatgccgtgtgctacttccagtggcgccaatccaggtccggcgcggagaagttccattccgcgatgctgccgcatgcgggggaggattcccagacgttccgggacgtgtgcgaactgggccgtgatctgggcacgcttgcggatgagggactgctcggcaccaagctggcgaaatccagcgtggccatcgtgttcgattacgagtccgaatgggcgagcgagcacaccgcgaccccgacgcagaacgtccatcatgtcgacgagccgctcgcatggttccgcgctctggcggacgtcggcgtgaccgcggacgtcgttccaatccgttcgaactgggacgagtacgatgtcgcgatactgccgagcgtgtacatcctctccgaggagaacacccgtagggtgagggactacgtcgcgaacggcggcaagctcatcgccacgtactatacaggcatcagcgacgaacgggaccatgtgtggctcggcggttacccaggttccatccgggacgtcgtcggtgtgaggatcgaggagttcgcccctatgggatccgattggcccggagttccggaccacctcgatctcgacaacggagccgtcgcacacgacatcgtcgacgtgatcggctcaatcgggaaggacgcgaaggtgctcgcctcgttcaaggatgacccatggaccggtatggacggacgcccggccatcgtgtccaatccatatggcgaagggcgtagcgtctacgtcggagcccggctgggacgtgacggcatcgccagaagcctgccgatgatcctcgagacccttggtgtggaagtcaaagactcctcggatccggacttgcttcgcatcgagcgcgtcgatgagtcgacgggggctcggttcacgttcctgttcaaccggaccaaagaacctgtcagcatgctggtggagggacgcccggtcgtcatgtcactggccgactgtgctggcgcgacggttaccatcaatcccaatggcgtactcgtcgtcaaacaataatggctcattaatgaggcgatatgccatgtgaacgttcacatggcatatcgcctttcttacgacagatggcatcgtcgtttttgatgatatgttcacaatatgttgtgttatatcgtatgacaacacttaagttaagtcaggcatgtcttttgccctaccagcttctctgcgtgtggcattctcctcgcctctacagacgtggagaatgccacaaaaggataatatccagtagaccgctaacgataaatatggccgagctgttcttcgttgtcgaataacggttgtgattgttgcttaatgttcggctgtgggattggcggttcgtgctctatggcttttttcttgcgtggctttggttgtttgtcatcatcataacgatcatcactccccagcacgttcgcttctcgtcaatgtatttgtatgcgattgcatggaatttagatgggattccatcgatagtgatagtgcaagacctttttttggcggttgcctttgccttgatttggccaatgttgccgactgggacgatccaccacgtattatgcatttcggatttcgatttgatgaggcgtgtcattctttcaagattttttaggcgaggattccccgcctaaaaaatcttgaaatcgcaggagatctgcatgtaggtgccaggaaaacgctcatcctcgcgcagatgctatgcgaacagctgattcccacgttcataggactcgtcatggcatattcggcactgttcattctcatcggcacgatgaatccaaccccgtccgactcacttgccattttcctcctggagctgcatgacggtctgccgttgccgtgcgccacggccatgggaacggcgatcgcagtcatactgattcgtgaaaaagacctgttccgcttgttcaagaccagatgaatcggacatataccggtggaacgaatcgccattggaggatcaagttcgtgtgatgtcgtagaccataagtcatcagttaagcgttgtgtgacaattccatacaacgctttcttcatcgccgtacaccctttatggcgaagtcgaaggatagccacgggaagacgaggacacgtgaaccggtccgcataagcaaagcccagaggcaaagcatccgcccatctgtcccatcgaaaccggctagtttgattctgtcgtgtccgccgacgaatcatcggcgcaatgcgcatcgaaacatatcccgtcaggaccttctgctgtgagggacacgaaggtctgacgggatatgccggatccgttaaggttggatccgacggagcaatcgctggcgttcattccggtcgcttcatccggaatacgcctggcgtcctccatcttgcgatgcaccattcgatgcgttttggctccaatcaggaacgaatcgagatctgccctacagacaatttccgtggattgactccacctaatgtgacgacgcacgcgttcgacttcgaaccgatgggaaacgtgcgatgcggacatcgcgcactttcccgatctcgtccgaaacccgaaggcgcacagctttcttaagtgaaaatcgctcctgaaatggagccaaaggagttcccctttaaactgccttgaccattatctctcttttgattgtttgtaaaactcgtattgtggaagtggcgaaggccatgcttccttgcccgtctccattgcgggagaagatataagatcccgataaggtccttttatagacaaaaaccggttctttcgtcaatcccgaagcgcatccattggaatgccgttgtaggccaagtcaaaacgccggggttgaaaagaaaaaaggtgccgcaccattattcccacggaatctggtgcggcaccttttcttttgaaaggaaacagaagaagtctttgcgccttacttgttgatgaccttcttgaacaggtcggaggatgccttggcgagggcgaactggccgaagcccggatccatggaggcgaggttggagttgaggatctggttgaaagtgtcgttctgcatgttcattccttttccgcggcgctttgtcttccgttcgccgctattcttttttctcttgtttcgttatgccttgattgtaggcatgtcatccccgtcgccgcatgtcattccgattgattcttttgtatattcatcggtttgccagaagatttttgaaataacttaccgcaccattaccatcacataaaccaagaaggccccgacatggtcggggccttcttggtaaaaaagggaaggagtggcaagtattggtatttattcggtcagggttttggcctcctcatcgatggcttcgacggtctcggcggtctgagcttcgtcatcgacgatttcgccggaggcaagcttggcttcgagctctttgacaatcttagcatgcatcttctcgtcgatcttgaccttgaacatgaacaccagcaggctgagcacgatcagaataagcggcacatagaaggcgcagatttcgaaggtgtggatgttggagggggtcatatcggccgcggtggcgttgccggtcatgccagcagcgacggcgatgaagccggtgatgccgttggacagcgcgccgccaatcttatcaagcatcggacgtacggacagggtgacggcctcgttgcgcttgccgttcttcagctggccgtattcgatggagtcggtcagggagaggatggcggtcatctggatgagggtgcccgggatgtagaagagcacgagggcgatgaacaccacggtcatgttggtggagaagagacccagcaggatgtaggccacgatcatggaggtcatgccgacgatgtacaggactcggcgtgggatgcgcttgttcaggatcgggtacagcggagccatgatgaggcctgccaccaaggcgatgacgccggtcatggagtaggcggcctggttgtcgagcacgaacttgaacaggaagaggagtacgccggtggtggccacgttggcgatggcgtacagcaggtaggacagggcgacccacaggagctggtcgttctggaacagggccttgaatgcctcgagcgggttgccgttcttctgggccttggcgcgcagtgcgttggtgctttccttggtgccgaacgcgacggtccatgcggtcaggatgccgaggagtccgacgatgatgccgaaggaggtccagccggcctgtccttcgcccttggcaccggtgagcgtccaagtgaagtagctgacgatcgggatgaccacgacggtgatgccgttgtagccgatggagccggtgaaggagccgagggcggtgtaggtggagcgctcgtgggagtcggaggacagcgccgggatcatgccccagtaggagatgtcacgcagggagtagaacacgtcgagcacgacgaaggtgatgacgaacagcacgatgaacagcgtggtgttgacgttcaccaggccgaacatgccgctgaagatcacggcgagcaggacggcggagatcaggccgccgaagaactgccatgggcggaagcgtccccacttggtgttggtgttgtcgatgaggttgcccagcagcgggtcgatgaagatctcggcgatacggataatcaccacgaggctggtgatgacaccgataagcttggccgcaagcgccttgtcaacgcccgagaacaggcagccggtgacatagacgatgaaatatgtgctcatcgcgttgtagaaggcggactgaccgaggttgccgcaggcgtaggcgatacgctggccgagcttgcccttcttgcggacgccaccgtccgcggttgtcgtttcgttgctcattttttcttctccttaagattccggagttgaagatcacccattgatcttgcatgtcgagtatacgctctttacaagaaaaagtaaaaaccattagcaaaatatagggtttggcggcgtgttgaattaggtaaaccgtgtaccagcactgtcatatcggtatcaatcagatgcctgatacgttacaacatataccgctgatacgaaggaattaagacgtcaagtaaaaccgatttgctttttttgtaaacaacgtttattatctggtaaaggaagttcatcttccctccatcattcacaaagatgtaatgaacgaaagcaggaaaacatggcaaacgaaacccgcatcgaacacgcatccgagacctggctcgccgattcgaccgtattcgaggtcaaccgcgtcccggcgcattccgaccacaaatgctacgcgcacgatccgcagaccaacgaatggtccgatctgaggcagagcctcgacggcgaatggagggtcgaggtcgttcaggcatccgacatcgaattcaacgaggagcccttcgtaagggagaacttcgacgattccgccttcgaacgcatccaggttcccggacacctgcagatggcgggattgatgaacaacaagtacgtgaacattcaatacccgtgggatggccacgagaatccggcggaaccgaatattccgaagaacaaccatgtcgccctctaccgtaagaccttcacgatggcgaaccgtctggccgacaccaagaacgccggcggaaccgtctccatcgtgttccacggcatggccaccgcaatctacgtgtgggtcaacggcatgttcgtcggctatggcgaggacggcttcacccccaacgaattcgacatcaccgagatgctgcacgacggcgagaacgtcgttgccgtcgcatgctacgaatactccagcgcctcatggctcgaggaccaggacttctggcgtctgcacggactgttccgctcggtcgagctggccgcgcagccgcatgtgcatatcgagaacatgcagatcgaatccgattgggatccggagtccggcagcgcctctttggacgcggcgctcaccgtgcgcaacgcagccgacgcggccacgatctcggcgacgttgaaggattccgatggtaacgtcgtctgggagaccgcgaactgcgctgaccccgatacctccatctccaccggatcgttgaacggcatccgcccgtggagcgcggaggatccggtcctctacgagttcgaggtcacggtcatcgaccatgccggcaacatcgccgaggtcgccgtccagaaggtcggattccgccgcttccgcatcgaggacggcatcatgacgattaatggcaagcgcatcgtattcaagggcgccgaccgccacgagttcgatcccaagcgcggccgcgcgatcaccgagcaggacatgatcgacgatgtggtcttctgcaagaggcacaacctcaacgccatcaggacctcccactatccgaaccaggagcgctggtacgagctgtgcgacgagtacggcatctacctgatcgacgagaccaacctcgaaacccatggcagctggtgcctgcccggtgacgtcctcaccgaggagaccgccatcccgggaagcaaggcgcattgggagggcgcgtgcgtcgaccgtgtcaacagcatggtgcgccgcgactacaaccatccgagcgtcctgatctggtctctcggcaacgaatcctacacgggcgacgtgttccgcgccatgtacaagcgcgtgcacgacatcgacccgaaccgtcccgtgcactatgagggcgtgacccacaaccgcgactacgacgacgtgaccgacatcgagacccgcatgtatgcgcacgccgacgccatcgaggaatacctgaagaatgatccgcagaagccttacatctcctgcgagtacatgcacgccatgggcaattcgtgcggcaacatggacgaatacaccgcgctcgaacactatccgaagtaccagggcggcttcatctgggacttcatcgaccaggcgatctacgccacccagcccgatggaaccacgagccttcgctatggcggcgacttcggcgacaggccgagcgactacgagttctccggcaacggcctggtgtttgcggaccgtaagcccacgccgaaggcccaggaggtcaagcagctgtattccaacgtgcatatcgatgtcgccgaggattccgtgaccatcaagaacgataatctgttcacctccactggcgaatacacgttcgtgttgcgtgtccttgcggatggcgaaccggtatggcagtccgaacgccgtttcgacgtgccggccggttcgacggagaagctcgatgtcgactggccgttggatctgtaccgcgacggcgcgtccgaactggtgctggaggtatcccagcgtctcgccaaggcgaccaattgggcggtagccggctatgagctggcattcggccagaccgtcgtcgccggctccaagaaggcctctgctccggtgaagccggtcgacggcatcgtcaccgttggccgttggaacgtcggcgtgcagggatccggccgcgaggtactgctttcccgcacccaaggcggactggtctcctacacgttcaacaatcgagaattcgtgctgcgccgtccggcggtcaccacgttccgcgcgctgaccgacaacgatcgcggcgcaggccacggcttcgaacgcgcccagtggctgggagcaggccgttacgcccgctgcatcggcaacgagatcgaacagatcgacgaggacaccgtcaaggcctcctacacgtacgagctcgccaccccgcagcgcaccaaggtgaccgtcagctacaccgccgacaccaccggacgagtgaatctgcacgtcgaatacccgggcgagccgggcgacctgcccaccatccccgcgttcggcatcgaatggacccttccggtccagtactcgaacctgcgtttcttcggcgctggtccggaggagacctaccaggatcgcaagcatgccaagctcggtgtgtggagcaccgacgcgttcaaggaccacgccccgtatctcatgccgcaggaaaccggcaaccatgaggacgtgcgttgggccgagatcacggacgagaagggccatggccttcgcataagccgcgccgaaggcgccgaaccgttcgcgatgagcctgcagccgtactccagcttcatgcttgaggaagcccagcatcaggacgagctccccgccccgaagcacatgttcctgcgtgtgcttgccgagcagatgggtgtcggaggagatgactcctggatgtccccggtccacccccagtaccatatcccggcggaccagccgatcagcctcgacgtcgatctcgacctgatctgaccggcgcgccccggcggaaaccgggacttggctttcctttcgccatacgcggaaacgtatggcgaaaggacggtgccgtcgtcaagggtggaccttgacatcaaaccggagacggcgccttgaaagggtacggcacgtcttccatgttttccccgtgccgtgccctcgtttccatatcgggaacagggcttgacagactttccttcgaaaacacctcacagatgcaaaagggttcggtcctcgttggcacgtattacgcgtgtcaacgaggaccgaaccctttcttcttaaaccctacctggctttcggggtgaaactgtcccgggcgaccagcttggttgaaatcctcatatgctggttgacggagcgccccatggaaatggcctccgacagcatgaataccgcggccttggccaattcgtccttgttgatgtcatacgacgaaagcgtcggcgaagtgtaattcgcgatctcctggttgttgatgctcaccagtcgcatgtcgcgtggaaccagaatgccggccgccgcgaacgcctgcaagacgcctactgcgatggggtccgccgccacaatcagagcatccgggagcctgtcgccacattcggccacgaacctctctcccaaggcacggccgttctccacggtgaaaggcccctcatcgaacaccaggccgtcgacgtcaagaccgagacggacggtccagttgcggaacgcgaacgcacgcggatcctcgggatactcatggtcgcccatgatgttgccgaaccctccgatgaacccgattcgcttgttgccggcgtccatcaattcgtccaaggcgtccagaatggtctgctccagatccggctgcaccgaatcgaacaggctcggcgcgggattgatgtcgatgaacactccatgcggaaggaccgcgtgcagacgcttcaacatgttccttttgaacggcgccggacctattgagatgaatccggcgtatttggacgcgtccttcatcagggatttgacatcgttgtattccgtcactctcatgcgctcgtccttggcatggcgacgtaatgaaacttcaagctcgtcaaaataggcgtcctgaagccccttgtcgtggatggagttgttcagcaacgcgatgtcttgcggaatggtgacacgttggtagcgggggacgttctcgtaccccatctcaatgctggtgctcagaatcttctgacgggtggcctccttcaccgagaacgaggggtcgtcattgagtattctcgatacggtcgcctgggagaagcccgccttttccgcgatctccctgatcgtggccatggaaacctacctccttggaaattcagcaactaaacgtgtttagtaacgagtttatcatgtttggaagcgtaattgccatcaatgtcggaaatttcgttttcaatgaaaatggattggctacaatgtattggacagtccgatgaggccattcgtggattcaagctcaatatgctgctgtacgaactgctatcgctgctgtattcgaggttcgtttccggggtacggcggccggaattggtcagatccggaagaaacatcaccatgcagatcatcggatacatgacatcgcaccgcaaacagcatctcgaagcgaccgacgtcgcacgggaatttggatacggcagggaacatttctgccgcctattccgcaaggcgaccggcaaaacgttcaaagaatttctgaccgacctgcgattggacgacgcctgcagaaaactgtcaggttcctctgcgtcgatagccagcatcgcaagggaatgcggtttccccgatacgcgcgcgctgcagacggccgtgcaacgcaaatacggcatacgcgcgcaggaatatcgcgaacgatacgaaaatcgaaactaacgttcaacgagagaaggaggaaatatgactgggcctgcaccaaccatccgtcgtatgaaaattgaagattatccgctggtatacgggttgtggacgcgatgcaccggtttcaccatgagggacatcgacgattccgaggatgcgataaaaacgttcctcaaacgcaatcccgacacctgtttcgtagccgaggacgatggcggaaggattattggagcgattcttgccggtcacgacggcagacggtcgcgcatctaccacacggcggtcgatcccgacgcgcgcggtatgggcattggctcgcttttggtgggccgcgtggttgaagcgcttcgtgcgatcggcctgccaaaagtcgccgtcggtgtgcccgcagacaacgatgccggcaacgatttctgggagcatcaggggtttgctgtccgtgacgatttggtctatcgggaactacctctctaatacgacccgtccgacaacgaaccgtccaatacgctcgcactttgtctctataagcccggttccgcacttgcagtccgcaacaaatatgttctgtatatcaaacgtgttcaaagaccatgcagtggaatatcagaaggaggaagacccgttcggagcgcttaagagagacgagctgctgtgacgaatggcgatacggcgatgtggtcatcgctgaccttgccatcgttttctctgaaacatccggcatcctcatctcacacttttatgagcgagtttttacccttccgtcacatttcatgagggagagccgcccttccatggccacctgtgcaccctatgcaccccttaaaaaacggcgccattccgccatgaaatcacccccttcatccgagcatggcattgcgcaccccgtcaaaacatggccgtcatccctggtttcccgatttccgcactttttgaaaacccgttttacccgatttccgcacttttccggataccgagcggcactgttccgaccgcgcgactgcatcaaacgccgattccgacgattctacagattaacggtaaaacgtcgcgcggcgaccctgccggcttgcggaatggaggtcaggcttattccgcggcgcccttcagcagcatcgcgccaatgccctcaccttggtgacgcaggtctatggcgagcctgccgttcccatccatggtcacaatggtccgcacggccgatccttcgccaaacgccggcgacatatgaacatatttttaggaaacgactgttcagcgcttgccatccgcttcattcagataccgatatacagtggattgcccaacgcccatcatcaccgcaatttgaccgaccgtaccattacccgtcaaaggcatggagtttcggaacgttgattacgggacgggttttgagacactttccgccggagtgtcggagacaactcccccagtccggtttacgctccgaaaacgtccgttttcgaaatggtccaagacgcattccgatggtcctagtcggattcaccaagtgttgcatgttgcattcggtacaacatttaagaattcacaggaccacactcatccaacaacgaaccgatttcgcgacatggcgacatgacaacagataacgcccagacaccgcgcgaccggtctcattcccatcacccggccacgtcaaaccgtcgtcgttccacgaagacagccggacccgcaacccttcgtcggactccacgtccacctggcaaggagccagccggttccataatcctcatcatcaagacgctagactgtcttacaaaccggaaaatcataccgtccggcggcaatcgggaatggaaaggcgatggcaatgacgcgcatcgaagacggaatccaggatacggaaccgatccggttcctcgaactattgggactcgacgaagaggacctagccggctatagcattcgtctgaatggcagcaacccggaatggggcaaatggagtgatcttcccgacgcctactattcctcctatgatgacctgatgaagtggattttcacgaagaaatggccagataaggataaggcaacagcgcagattcacacacgtaaagtcctccagttcattcagctcaagccagagaatccccaccccacacaatggctgttcgtcggagcctacgacgtcctcgacgagtacacggagaacgacggcaagattctataccgttacaatgagatcccggaatacgcctcgctaaaggccagggcggtagtgtactacaaaagagatccgggttacacgggagtcgtctttaacctgtccaacaatgaagaacgacgccgggattttctcaagacgatgaccattgagaaaatcgctcaatcccccgtatccgcgttaccgttccctggatacgagaacgttcggttgacgcaccggcagctcgtggcggccgtgaacaacgaggaatggcgggcggccctcggcagcgtccaggcggtctatctgcagaccgatagacgaacgggatggcattacgtggggtccgcctactcacggaaaggagcctcgcacggtctgctgtcgcgttggaaggaatacgcgtccggagaccactccgggggaaacaagcagctcagaaacctcggcgccggatacatcgagaagaacttccagtactcgatcctggagatcttcgacatgaacaagtcacccaaagagatcatcgaccgcgaacactggtggatggacaccctcggatccgtccgtagaaacaacgacgaagtaccccacggatacaattccgtcgccgaacgagagaactccgaccaacacgaatgatcctgtgggtagctcctaccggctgaggctcgcggtgccggccgtgacctcgccgagggtgggaagcggcacgctcgccgaaataggcgaccgtgttcttcgaatcgtcatgttcgaggtccttcccgcaccacggcccgtatttatcgcccgcggcgcatccaagggattcctgtctaaattccgacatatccgaaatgattacggactgtcaatctgaaaaagcaaagcccatcccctggtcgagaaaccttcgaacgaatacggatatccgtttccaagacgcgcaaggacacgttccgccggacatcatttcggttcgctaagcgttttatgtaacgctggtgcaaacacttaagaattcggccgccatccgcgtggagatgcattccatcctccgtccggcttggaatacgcatcaagtcattccattgtggctagacatccagcgaatcgggtcagaccgagttcgcgcaggcgtccagcacgcccctccccgccggcccgccataacccggctattttctcgagttgaaacgcacttggccgacagggccactcgggaaaggcaaggaatgacgaaaccggcgtcgatacagcaacgtatcaggagacgcttgacacgttaagggagatgcgaccttacgggaacagcagtgctgcgttttcggcgtatgccagccgcgagcatcggccgccggacggacatgttcttccagatcgagggctatacccgttttctattgaatccgccaaatcaaacgaaagggcgcacgtttcaaaacgtgcgccctttcatgtaatggatggagaggaaacggcttctatctggccatgaccccctttctcgcgattgatcctagccaatccaaggatggcttcggatggcgttcgaaggtgtccctgtcccaggaggccaggccgaacgtcggagcgaacgagccccactcgtagttgtcgagcagggaccagtggaggtatcccctcacgtcgataccgtcgtccatcgcgtcgtgcatgccggctatggcgtcgaaggtgtaatcgattctccggcggtcatcggcagtggcgatgccattttcggtgacgattatcggcgtgcgtttggcgacgttccaagtatggcggatggcgatgcccagcgccggcgggaagtactcccagccggtgagggtgcgttccgcgtcctcggggatcggtacggggccatccttgccgatgaaggtcctcagataggcctgcaccccaatgaagtcatccccggccgcggcctcggtgaagtagtcctcgcgcgggtactggtattcctccatctcccgttcgcatccgggcatggcgtggaacgcctggcaggcgatggtccacccggacttgatacgcgggttctcggacagtatttccctggctttcctgtgcgctttgacgagcgtggcggagatgtccggatcgggcgcaggcagcgaggcggccacgaagtcgctgccttcggttccgccacgggtcagcgcgaccatgttcggctcgttaatggtgcagacccaggtgacgtcgtggaggatcggcatcacgtaccgcacgtaccgggcgaagtagtcgacggcatcggcgttgagccatccgcccttggtggcgagccacagcggcagtgtcatgtggttcagcgtgaccatgggctcgacgccgttctcgtggcacgcgtcgatcatttggcggtagtgcagcagctgcgctttggagaagcagccctccgcgggctcgatgcgggcccattcgatggagaagcggtacatgcccaatccggcgtcggcgagcattctgatgtcctcgccgtagcggtggtagctgtcggccgcgtctcccgacggttcgctgagatccgtgcgttcggcatgctccctggcccaccagtcgctcgcgacgttgttcccttcgatctggtgcgcggccgtggacgcgccccagatgaattccggcgggaactcgtattgttctttcataacatgtctttctatttgatgcccgttccggcgacgccctggatgaagtagcgctgcaggaatacgaacaggaggaggatcggggtgaccaccagtaccgctccggcgagcaggacgctgtagttcgtggcgttctggccggtggagtagagggacagtgccacgggcagcgtgtacttctcctcggtctgggccgcgaccaacggccacaggaagttgttccaggaggacaggaacgtgaggatggacagcgtcgccagcggcggcccgcactggggcaggacgatctggaagaatatgcgcagctcaccggcgccgtcgaccctcgcggcctccatcagcgcgtcggggattccggagatgaactgtctcatcaggaagactccgatgggctggcacaggaacggcaggatgagcgccgcgtaggagttcgcgagtcccatgttcgagatgatcacgaacagggggacgaacgtggccacgctcggaaccatgagcgtcaccatgacggcgccgaacaagatgttcttgccggcgaagtccatcttcgccagggcgtatccgaccatggagcagagcaccatgttcccgaggacggtgatcacggcgacgaccatgctgttggtgaagtaggtaccgaagttcagttccccgaaccatttcgcgaagtttgcgagcgaggcgtgctcgggcaggagcttcggcggtttggcgaggatctccctctgggtcttcaacgagcccagcgccatccacaggaacgggaagatccagaagactccgatcaccgcgaggacgcagtaggagagtccacgccccttgacgaatcggcgccagagcgactgcttgttgctttgcggcctcgaggccgcgactgtcgtggctgtcatctcaatcctccttgagaatgcggaactggagcacgctgaccagcgcgatgatgatgaacagcacccagctggctgcggaagcgattccgtactgtccgaaaccgaacttctggtacacgtagtacgcggcggagagcgtcgagtcgagcggccctccctgggtcatcacgaaggattcctcgaagaactgcaggtaggcgacggaaaggagcacggctcccagcagcagcgtgggcttgagcagcggaagcgtgatgctgcggaaggtgcgccatttgcccgcgccgtcgatggccgcggcctccttcagctcctcggggatggcctgcaggccggcgaggaagatgatcatcagcgttcccatgttgcgccagatggtcatgaccatcagcgcgggcagtgcgtagcgggtgtcgtgcagccagtccggtccggcaatgccgaagacggccaagagcgagttgagcaggccgtccttctggaggatgtacctccacacgacggagactgcgaccacactggcgacaaccggcgcgtagaacacggccctgaagaacgcgttgaggtgcttggattccttgttgagggccaccgcgaatgcgagggcgatcgccatggtgatcggcaggccgacaagcacgaagattccggtgacgcccaacgcgtgcaggaaacggtggtcgtggaacagggtgatgtactggtccagtccgacgaagttgacgttgaacggggtgcgaaggtccttggaggtgatgtcggtgaaggacatcgccatcgaggacaggaggggaatcagcatgaatacgcagaacacgactgcgaaaggcaaggcaaatccccatgcgagaatcgtacggcggcggcggaggacgttgcccgagccctccgtcttcgtctttcttgtcccgaggctcatgggatcagtttcccgttccgatggagtcggcttcggactgcaggttcttcaagccctcgtcaacggagacctgtcccttgtttatctgctcgaggatgcggtcggcagcggaggacacctgcgcccaggtggacagcgccggcggagccatggtgttcttcagctggtcgccgaatgccgaaagcttgtcgttgccggagagcgcgtcatcgtcccatgccttctgggaagcgggcagatcggaggacttcttgtaccattcggcctgcacctcgggtttgctggcccactggatgaacttccacgcggactgcttgttcttggaatccttgaacgtcacaaggtcgcagcctccgacgaaggacgtggcgggacccgaggattcgtccatcgacggcaggacgacggtggcgtacttggattcgaatccgtcgccgcccaattcgttgatctggctgacggcggtcggcccctgcagcatcatcggagtgtcaccggacacgaagttcgctatgtcggcaccggagcttacgtcggcgttgacgttcgcgacgccgtccttgtagagactggtggtaaagttcagtcccttctttatgccagtatcttcgaaagtccatttcgtctgttccttgttagtcaaggacgccccggccgagtaggagaacggcaaagttccgaggaacgcgtcagtgccagatgggttgaggttcatgccgtatttgaccccatcgaccttctgcatgtccttagccatctgcttaagctcattccaagtcttcggagctttgttccaaccagccatctcggcgatgtcggtacggtagtacagcactctggtgtcgatgtaccaaggcacgccgagctgtttcccgtcgacctggccagtagccctagacccgtcggagaagtcggacatgtcgaggttgtcaggcacggtggagaacgagttggagaaatcggccatccaggtggtgcccatctgcgcaaggtcgggaccgttgcccgcggcgatggcggtctggagtttgtcgtgcgctgaggaccatgggatcgcggtgaccttgaccttgacgtcggggttctccttttcgaatcccttgacgaaatcacccagcaggtcgccctcgttgcccatggcccagatggtcaggtcgccggtggccttgcttgaatcgatggtcttgaccgcatcggaatcggaatccgcgttgttcgcggaccgtccgcacgcggacataccggcaatcatcgccacactggccatgccggccacgaccgctttgaaaaatggcttcctcattgaaatctcctttgattcatatcaatctaaccgcttagattgatattacaatttaagcgcttagatttaaggaagtcaaggcgacacgcccatatgatttatgcgcttagattttttgattgcatccgcagctgccgcgcacaatgaggcgaaccgggagtactcgtctttcagccttctcccaaggctccccgttcctggaaagcagcatgcgagccgcctcgcgccccatgtcctccatgggctggcggacggtcgtcagctgcggttccatcagccgtccggcgaggattccgtcgaatccggtgacgatgacgtcgtcgggaacccggacaccggcctcctcgaggagtctgatcacgccgaaggcggtctggtccgtgccgcagaccaaggcctgcggcagtctgccggatcctatcgcctcacacaaacccaccatgtattcatcggacgtggcgaaggagtcatccaacagagcccctttggagtctagcccgcgttcctcgaggtattttttaaacgcgtcatagcgcgagacgacgtcatcagcgtcggtacccctcgcgcacgctccaccattgacaccaccgacgaatgccatatcgttgatatggtggacttcgacaagatggtcgacaatctgtctcatgcccgatgcgttatcgcattgcaggtatgcggcaggcagtttttcatcgcccacacccaccattacaagcggaatggtcttcgccaacatggaaagagggagcgtatcgttatatccacttggcatcagcgccagaccatcaacgcgaccggcgatatccgttacagatctatgatcattctttttcgaggcggcacccatgagcatgcccttcccgctcttccagcattcgagttcgaagccgcggagcacctcatcaacgtataacggatatacaagaacgttgggttcgtcaccgtccagaggctcgtcgatggatctgggggaaacatcaggccaatcatcctcaaggttgcttccctgaggtctttccagcagcatatcgaacgcgtacatgcccaacgtgcccgtcctgcctttggcaaggctacgtgcgttgccgctgggaacgtagccaagctcctcggcgaccctgaggaccttggccttggtatcatccttcactttgtcgggatgcctgaaggcgaaggagaccgtcgcggtagacacacccgccttctctgcaacgtcatacaccgtaactcttgccataagaccagtctaagcgctttgatgcatgggacacacacgaggtcccaaaaccatagtttttccggtcttctagcaggaatccgcggcgccgaagagaaaaaaccaggagtggaaaggatttccatgcccctgcgggagacctgggaatcagatggaaatcaaggatggaaagacggggtccccggaagccaagccccacgggagtcccggaaggaagaaggaaatacgggaaataaaaaagcccttccgggaacccgcatggggtcagccggaagaaccgggaggaggaacaaaagattcggggataaaaaatggggttcccggagcaggatgctcgacgggaacccccaacgtttgaagcggcggcgtgctactctcccacaccctctcgagtgcagtaccatcgccgcgcctggccttagctaccgggttcggaatgggaccgggcgtctcaccagggctatgaccaccgcaaatctaatggccacggcaaggaaaccaaaggaatccaaaccggcatgttatcggtggcggtttgggaaccggctagcggacgcgaggcaaagcctatcgtttgaatcgtttcgtgaccatcccaacgcatattgccgtccaggacgatccagcacaggaaagacgcggaaccaaccctccatgaaaggattggaattgttgtgtcgccgtcgcccgttagtaccggtcggctccacccctcacggggcttccacctccggcctatcaaacacgtgttcaacatgcgggctacaggatctcgaagatccatggaatcctaatcttggagcaggcttcccgcttagatgctttcagcggttatccctcccgaacgtagccaaccggccgtgccgctggcgcgacaaccggcataccagaggttcgtccacccaggtcctctcgtactatgggcaggcctcctcaggattccaacgagcgcagaggatagagaccaaactgtctcacgacgttctgaacccagctcgcgtgccgctttaatcggcgaacagccgaacccttgggacctgctccagccccaggatgcgacgagccgacatcgaggtgccaaaccatcccgtcgatatggactcttgggaatgatcagcctgttatccccggggtaccttttatccgttgagcgatgccgcgcccgtgcgccggcaccggatcactatctccgactttcgtccctgctcggaccgtcgtcctcgcagtcaagcccgcttgtgcgattacactcgacacccgattgccaaccgggctgagcggacctttgagcgcctccgttactctttgggaggcaaccgccccagttgaactacccgccaggcactgtccctgacaaggatgacttgtcgaggttagacgtcaaacgagaacagagcggtatttcaccttgcggctccgcgatggctggcgccaccgtttcaaagcctcccgcctatgctacacaatccgcgcctaacgccaataccaaggtatagtaaaggtcccggggtcttttcgtccttctgcgcttaacgagcatctttactcgtactgcaatttcgccgagctcctggtcgagacagtggggaagtcgttacgccattcgtgcaggtcggaacttacccgacaaggaatttcgctaccttaggatggttatagttaccaccgccgtttaccggggcttgaattcaccgcttcgtccccgaagggattgacggatcctcttaaccttccggcaccgggcaggcgtcagtgcatatacagcggctttcgccttcgcatgcacctgtgtttttggtaaacagtcgctaccccctggtctgtgccacccaccaaagctccccgggctagccggttcaccccagcgggtctcccttataccgaaggcacgggagtgatttgccgagttccttgaccaggattcgctcgatcgccttggtattctctacctgaccaccagtgtcggtttggggtacgggcggccatggccctcacgccgaggcttttctcgacggcctggacaaccggatatcgagccataacggctcccatcatcacacctcgccatgcgcgccatgcggatttgcctacatgactggctgcgtgcttgaccacggaaaaccacctccgcggccggctcccattccgtgtcacccctgcgctgacctactgcggctacggtcccaacgccacgcggcgacaccaacccgaaggaaggaaccaccacgaggcggaggttagtactcaccgtctcggttttgccggtccatggtcggtacgggaatatccacccgttcatccattcgactacgcctgtcggcctcgccttaggacccgactcacccggggacgacgaacgtggccccggaacccttggtcatccagcggacgggatcctcacccgtctctcgctactcatgtctgcattctcactcccacgaagtccacggccggtttccaccgccgcttcgcccctcgcaggacgctctcctacccagcaaccatgaagattgctgccgcgtcttcggtggtgtgcttgagccccgctacattgtcggcgcggaaccactagaccagtgagctgttacgcactctttcaaggatggctgcttctgagccaacctcctggctgtctatgcgactccacatcctttcccacttagcacacgcttcgggaccttagacgacggtctgggctgtctccctctcgacgacggagcttatcccccgccgactcactgccggaatacacgtcaacggtattcggagttcggctgctgttggtacccaacaagggcccgcaagcatccggtagctctacccccgcgacgcaatcgaccgacgctgcacctaaatgcatttcggagagaaccagctatcacggaatttgattggcctttcacccctagccccaggtcatccccccggttttcaacccaggtgggttcggtcctccacgcggtcttacccgcgcttcaacctgcccagggctagatcatcccgcttcgggtccaggacaagcgactacaaacgccttttaagactcgctttcgctacgcatacgccacacggcttatgctcgccacccgccactgactcgcagactcatttttcgataggcacgccgtcaccccacaaggaggctccgacggtttgtgggcgcacggtttcaggaactgtttcactcccctcccggggtgcttttcacctttccctcacggtactggtacgctatcggtcagacaggtatgcttagacttacccaacggtctgggctgattcacgcgggattccacgaggcccgcgctacttgggacaacacgatcggaagacggctcacgtccaggtacggggctggcaccctctacggccaggccttcaagcctgttcccctggcaagccgttttatgactcccgcccggcccgtcggaaccgggacacgtgatcccacaacaccggcaacgcaacccccgacgggtatcacgcgcaaccggtttggtctgatccgctttcgctcgccactactcacggagtatcccttcctgcaggtactgagatgtttcacttccctgcgtaccccccgcccataggcggtgccggcccatgacggccggcgggttcccccattcggagaccctaggatcaaagccatgttggaggctcccctaggattatcgcatcctcaaacgtccttcatcggtactgtctgccaaggcatccaccatacgccctcgcaagcggcacaacagcaaaacaaattgtcattgccccacccgcgggtttcctgatagcaagatcgccagacgacaaatcttaacactaaaatgatcacaaaacgatcgatctcgaaaccaaactcaattgaagagtttggcgaaatcgcgataagcaaaaagaaacgttctttcagtttctcttgctcgcgtccactatccagttctcaaaccaccacgcgccacacgatccgaccagccacccaggaccggccaccacgcatgggcatcgaaccgcgccacagaaacaaacctgtggggtggcggtccgggagcccaaaagcatacccataccactcccggacgggaatcccgacgggacatccaagcccatgatctcttccacaccagcatccacactataaggcatgactgtcacgccatcgtgtggcacacactgtccaaaaaacattggactgaattctccgtagaaaggaggtgatccagccgcaccttccggtacggctaccttgttacgacttagtcccaatcacgagtctcaccttagacggctccccccaaaaggttgggccaccggcttcgggtgctacccactttcatgacttgacgggcggtgtgtacaaggcccgggaacgcattcaccgcggcgttgctgatccgcgattactagcgactccgccttcatggagtcgggttgcagactccaatccgaactgagaccggttttaagggatccgctccccctcacgaggtcgcatcccgttgtaccggccattgtagcatgcgtgaagccctggacgtaaggggcatgatgatctgacgtcatccccaccttcctccgagttgaccccggcggtcccccgtgagttcccaccacgacgtgctggcaacacagggcgagggttgcgctcgttgcgggacttaacccaacatctcacgacacgagctgacgacgaccatgcaccacctgtgaacccgccccgaagggagaccgtatctctacggctgtcgggaacatgtcaagcccaggtaaggttcttcgcgttgcatcgaattaatccgcatgctccgccgcttgtgcgggcccccgtcaatttctttgagttttagccttgcggccgtactccccaggcgggatgcttaacgcgttggctccgacacggagaccgtggaatggtccccacatccagcatccaccgtttacggcgtggactaccagggtatctaatcctgttcgctccccacgctttcgctcctcagcgtcagtgacggcccagagacctgccttcgccattggtgttcttcccgatatctacacattccaccgttacaccgggaattccagtctcccctaccgcactcaagcccgcccgtacccggcgcggatccaccgttaagcgatggactttcacaccggacgcgacgaaccgcctacgagccctttacgcccaataattccggataacgcttgcaccctacgtattaccgcggctgctggcacgtagttagccggtgcttattcgaaaggtacactcaccccgaagggcttgctcccagtcaaaagcggtttacaacccgaaggccgtcatcccgcacgcggcgtcgctgcatcaggcttgcgcccattgtgcaatattccccactgctgcctcccgtaggagtctgggccgtatctcagtcccaatgtggccggtcgccctctcaggccggctacccgtcgaagccatggtgggccgttaccccgccatcaagctgataggacgcgaccccatcccataccgcaaaagctttcccagaggaccatgcggtcaactggagcatccggcattaccacccgtttccaggagctattccggtgtatggggcaggtcggtcacgcattactcacccgttcgccactctcacccaggagcaagctcctgggatcccgttcgacttgcatgtgttaagcacgccgccagcgttcatcctgagccagaatcgaaccctccacaaaaaaaccttttcatgaagagacatcgacatgatgactctcgaaataagaaaattgacgatcgccttataaggaaaggcgcatcgcacaaaaacctcgccgccgtttgaccgatccctcggcaccacgcgtcaacatggccggcaacgaactggcaatcattgactataaagaagtagtacaaatacgctcttgagttctcaaaccaccaccgcaccagcaagccgccccaatctccaggagcgaggccgccgtgctgagcagcaagagataaacttacacgagaacccgcaatcgcgcaacccgcagggcacaatgaagcacggaaccgttggaaatccaacgttccatcggcgtgtcgaaaaccgggaaaatgcgtccggaaagcgccgataccatcagaatagaccccgaaaaccacaaccaggtgaacgcaaaaccaatagctgtcggcgtgtcgaccatcaacatggtcaaccacatccgcattttgaggtccaaccacggttctcgcataacaaaagccggaagcttcgtggtcagcggaggctcccggctttgttgttcggctactggatattcagctttggtcattcgaatcgctgaccattgctaatgctgcctgtagccgactgttttcagttattacttcagttatcgctgatcaggcagctcactcggcattggccgggccggcggcaaccggttctgcagccgactcgaccgtggcgacagccttcttgcggttcaggtaccgcttgatggccacaatctccaggccgatcacgagcaccgcggtcacgccccaagccacgtacatggcggtcttccagatcggggtggcgaccttcggctcgccattcgcgtactgccagctgttggcggccgtgtacaggatgttgtgcgcggcctgacgcatggccttcacggaagtggcggacttatcggtgatgtggttggtgatcttcgtggtggcaagcatcgaatcgttgcccgcacgcacttcctgatcggcgttctggtagccgtagccgccgaagtaatcggtcaggacgaagcccttgaagccccactcgccgcgcagcacggtctgcagcaggttgctggaagcgccggcgtaggtgtagccgatgtagttgaaggagctcatcacggcctgggcgccgccttccttcacgctcatctcgaacggcttcagataggtttcacggatggactgctcgttggcccacgtgcacaccatgttggtgcggttggtctcctggtcgttgagtgcgaagtgcttcatgaaggagtacacgcccttggacttggcgccggcgatttcgttggaggccatcgcaccggagagcagggagtcctcggagaagtactcgaaggtacgaccggagaatgccgaacggtggatgttcatggccggagcgtaccaaccagccacgtgcatgtcgtgagccatgtcgccgatcatctcaccgaactgcttggccagatcacggttccaggtgcaggcgaacgcggtggaggccgggaaaccgatggagccaacaccggtgaagttgttgttcagcgaggccgggccgtcggcgtcggtcagctggatcttgccgacggacttcacagccggagtgccgtaaccaccattggcgatcaggttgtccatatcgtcgaaggtgagctggtcgagcagcttgtcccaatcggcgtcgtcataatccttgccatacatctggtacagcttcaggccattcttggcaccggttgtcggcatctcgtccgaatcgttgtcatacttcttcggatcgtagttgctgttgttggtgaactcggccttggcttcgtcgctcatcgagaagttggtcggagcggcggtggccttggcatagttcgcgaagtggcccgcgcgagacaggtacgtcacgtcgccggcggcgtaatcgaactcgttggtggcggccacggcatcgccgttatgggtgttcgagtcggaattgtaggtgacggtgtccttcacggtgaccttctgatggtcgatcacgtggtgcgaatcggactggatggagatgtcgtaatcgccctgctccagcacgtacgccttagcgtccttctggtcgtaggaggccatgtcgtcatcgtcgaactcgatcttcacggtctgggaagcgcccggctcgagcttcttggtcttttcgaacgcaaccaggttcttggatgccttctcgatgccgccatcggtgtacggcgggttgtagtagacctcgaccacgtccttgccggccttgtcgccggtgttggtgacggtcacatcgaacgagatcttgccgttcttgtaggagaccttgcccatctcctgcttgaacgtcgtgtaggacaggccgtagccgaacgggaacatgacggtgtcgtcgtagttgatcagaccttcgtcggcggcggtctcatagaacttgtagccaacgtagatgccttcgacgtagttgacgaacgtcggggtcaccgtgaccttgtcgccactgaagcccatgtaggaagcagtgagatcatccgcattgtcgtaagtgaacttgccgttcgtgccgacggacgaagcgttgccggcggcggtgccatcggtgttgttgaacacagcggtcttggtcaggtccttcgcgaacgtgtcggaggtcttgccggacggattcacatcgccggcgagcacctcacccagtgcggagaagccggtctggccggccggcgggcaccacagcacggacttgatctgcggatactgggacaggaagtcgaactggaacgcgttggcgccgttgtagacgagcgtcaccttcttgaagttcttggtgaccaggtcgatcatgtcgcgctcggtctgggacagctgcaggaagtgctcgccatccttgaaatcttcgtagtccttggaattgttgttgtaggtgatgcccttcgccttcatgttcgtcggcaggtcagcgccttcgccgccgacgcgggtgatggtgatgacggcttcgtcggagaagtccttggcgtcggagatcagcttgtcggaatactgcttggccggaacctcaggcagggtccaatcctgcgaccacatagccaccatcgggcggtccttgcggtagtcggtgtacagcttggtcagctcggaattggtttcgatgccggcctgcttcatgccgtcaagcatggaaacggtctcgtactggtcggacatggagccggagccggtgccgccgtaaaccgggttggtggagccccaaccgaacacgttgaccttcttgttggacagcggcaggttggaatcgtcgttcttcagcatggtgatggcttccgactgcacttccttggccagctcgttggctttggaaacggtggtgtcggacagcatgtacttggtggtggtcgcgttgttgagcagcgtggaaagcgggccggtcagcatcatggacacggccacgacgatgccgacaagcgccaccagccaggattcggaatggacgatcttacgggtcgccacgtccttgaccgtcttcttgttgacggcaaaagtgataatcagcgcgagcgcgaacagcacgccaatcgcaataaggtacggcgtcaatgagccgatgacgttcataacgtcagccatgttgatttgcagcatggtctgcctcctccttgattctcataaccaaacgacacgtaggctccgatgcctttatcggaaccgcgaaaccattcaacactgccccgcatctcatggtttcggtgaagtggctgcagatgcgtgcggcaagtgaagacacttcttcatgtcgatgattcgatttcatcagacttcaacgtgcggcacatggcgttttccccagcctgtcaattcgcgtgcataatctgcacgccaagtacgatggaagtatgagcgacttaagcgcattgaatctggaagcaggcagcctggttggcggctacacgttgatttcccggcttggttcgggtgccatgggctcggtatggcgtgtgcgggacgatggcggccatcaatatgcgatgaagattttgcgtgattccctctccgacgacgattccccgcagcagcagcgcgacgagttgaccgcacgcgagcgcctgcgcagggaggcgatggcgttgcagaaggtgcggcatccgggcgtgtgcggcattgtggatatggaacttgacgacgcgttggcttttattgtgaccgagttgatcgaaggcaagaatctgcgtgaggatgtgcgcgtcaatggccgatatgtgggcgacgatttggaacggctggcacgcaagctgattgaggcggtgcgtgccgtgcatgcggccggcatcgtgcaccgcgatatcaagccgacgaatgtgatggtgtcgagcaccggcccggtattggtggatttcggcatcgctatgggcgaaggcgaaagccatgtgacgcgtaccggtctggtgatgggcacgccggggttcatcgcgccggaaatcattgatggcgcggaatcggatgaaatgaccgattggtggtcggtggcgagcgtattggcgttcgccgctacgggtgagccggtgttcggcacgaagccgatgatgaccgtgttggaacgcgccgcggccggcagcgccaatcttgcgggacttcccgcgggcacgatggccgcgttccgttcggcgctcaatccggatcggacgaagcggtgcacgccggacgatttgctgcaggcgatcgccgtggatgcgttgaatccgcaggcgtgggttgcggccgacaatggtggcgcagcggatggcgatacggaggcgatgcccccttttgttgaatcgcccgacaatccgcgcacgttgtggcaatcgcaggacgacataaccggcgaaaacgccatcggcacgcgcacgatgccaaggctcagcgaagcaacgcaggcgatcgggcagcccgatgtgagcgcaactcaagtaatcgggaaacaagtgaccagccaatctgacgcgagcgcaacgcaggtgatcgcacctgttgacgatgccgagaccagcgtgctttccgacgcacttcccaacgtggacaacacgcgcacgatgccgcaatcgcaaggcacgcgggcgatgccgacaggcacgcaggtaatgccgcaatccatgccgtcaacacaaatgctgccggcccagaacgcatggaatccagcggaagcgccgacgcaagtcgacccgaccatcaaacccgcgttgcaacgcatcgccatgcggcagccaccgtccgtcataccgcaggccacggtggccgcggcgcagcaatcgcccgcaatgtcattcccgccggtacccggtatggatgggccgaacgttgcggaagcacccaatcccgccgatgtgaagcgtggcgcgatgttgggccggggcatgctcccctgcgcgctgatggcgattcccgtggccgtctgcggactgttctcactgtggacggcgatggcagccgcgttgctgttcgcctgtgcgctggccactatcggattcaacacggaggcgcagctcgagcgcgaaggcaaacgtggcggcgagaagaaaagttccgactggctgctgcgattggcgggactgccctggcacatcgtgaagggcttcggcgtcgccatcgtgcggacgctgatcatgttggccgtggccgcgctgggtttgtcgctcaccacggtcgtgctgcagcttccgtatgccgtgatggatacgtggatatttggattgacgattccgatgccgacgctgcttggcggtccgctttccgaaagcgggctggcgcaggctgcgttctgcgcgatcggctggcttgtggccgtggccgctccgggcgcgatcgtactgcgattgggcggcggcgcactgcgtaaacagccgtatctgcgccacttgagcgagctgccgacgcaatcgcaaggcaatacggaattcccggcgaatcgatagcaaggcatcgctagtatggtgcccagcataacaacgtgaggtcgaaaggaatatcgatggcccagaacagcaaggatgcgcagaagcgtaccagccgcgccgagcgtagggccgctgaggccgcagcgatgaaggcgcgcgccgagcagatggagaaggaacgcaagcagcagacgatcatcggcggcatcgtggtggcggtgctggtgattctggtggcgatcggcgcgttcaccgtgtaccacaacatgcataagaaggccgaaacgaaggcttccaccgaaaccgtgcaggaagcgtacacggcgttgcagaaagtgaagaacactccgaagctcgtcgataagaagggcggcctgctgatttccaagaacggctacggcaaggctgtggagggcgcgccgaccgtcgagctctacatggatttcctgtgcccgggctgcggcaacctgcaccgccagttggacgccgacctgcagaagatggtcgatgccggccagatcaatctggacctgcatttcatggcgttcatggaccgttggtccaccgacgagtattccagtcgcgcggcgaacgcggccatctacctggccgagcatgacagcgacccgaaccatctgatctccttcctggagaaggtctacgccgaggatttccagccggaggaaggctccgcatacaagtcggtgagcgacgccaagatcaaggagcagatgatcgccgcgggtgtttccaaggatgttgcggacaaggcgtttggccgcgattatcaggaatggcttgatgcgatcgacacttacacgccgaagcgttccgaactgtggcatcagtccggcagctacaagggcagcatgaccacgccgaccgtgatcatcaacggcaagtattgggatatggaccagctgaccaccgcccagacgacggttaaggacggtctgttggaatcgatcggcctgaaggacagcgaagtcggcgttgccggcaagatgccgtccatcggagccaagaaggggccgatttccgtcaccacgggcgaataaccccttacgggcagccggcgcgtctcaacccgcaatgctaagttgactgcggtggaagcgctggttatgctattcatcgttcctctgttgttttcatagcaaaagaggacatgcctccttagctcagatggccagagcggccgccttgtaagcggcaggtcgtcggttcgatcccgacaggaggctcgaacccgtatgacgggcttggacctcttaccatgggtaagtgctccagaagtcttcccccaacttgagacttctggcaaagcggacgagacgtcccccaacctgtctcgtccgaccgggggcaggacatccccttctctcctgccccctttttatttttcgcttttcgcacctgctttcaaaaatgtggcggtatggataaaaccatcggaaagcacggcgaccgttccagctgagccgttacaataacggcgttgtaggcagcgctgaaaagaggataaatgacgagaaggtggacccctcggagattcgtgacgcttcgtcgtgtccgcgtcatggcatgcgtggcctcattgactttgacttcggcgttggcgtttggtgtgggcgcgcgcaaatccgtggcgttgaccgtcaatggggagaccaccacggtgaccacatatgcgatgagcgtggaccgtctgctgcaagagcagggcgtgaaagtcaaaacgcacgacctggtggaatcgaccagcccgaccagcatgctgaagaaccatgatgtggtgaacgtgcagagcgcataccagaccaccatcaccatcgacggccaggaagtgccgttctggacggtcgcgtccagcgccgagcagttgctggacttcttcaaccaaaacgaaaccgaagcggcgaaaatcaccgtcaatatcagcaacgtctacaacaagctcaccggcggtctcatcatcaaccagaaggggcccgtcaccgtcatcgcggacaggaaaagctcggtggcgccgaacggcaagctgcccgctgcctccattcttgacgccaaaggcatcacgttgggcaaggaggatcgcgtcagtgtcgaaaaggacggcaagacgaccattctgcgcgtccgccgcgtgacgcatggtgaggagacccgcacgaaggaagtgccgttcggcacgcagaccatcatcgacccgaacctgcagccgggcgaagtcacggtacggcaggaaggcgaaaacggcgaaatccagcagacgtacgccgtcacctacgtggatggcgtgaaggaaagcgagacgctgaccggagagaagaccacgaaaatcgccatcgacaaagtcattgcggtcggaccggaaaaaactacggacgataccgacaagtccgacaaatccgacaacagcggcaacggcaacagcaacggcgataacggcgattccggcaagacggacgacggcaagaacgattcgggtaagaacgactcgaataaaaacgacaataagtccgattcgaacaagtccgattccgacaaaaccgattcgaacaagtcggattcctcggataagaacaattcgagcaacaactcgaataacaattccaacaacaccaagaaggacgatccggcaccgacccccacaccaacccctgcaccgcagccgactcccgcaccccaacccaaaccgcagcccacgccgcagccgagcaatccttccgcaggctgccgcttgtaccatccttccgcggcacaggcacaggcctacgcttctggcgcggcggcgcagcgcggctggaccggccagaactggacggatctggtcaaactctggaatcgcgaatccggatggagctggagcgcggaaaacgtgtattcgggcgcatacggtattccacaagcgttgccgggcagcaaaatggccacgttcggcgcgaattggaaggacgatgccgccgtgcagatcgactggggtctgagctacatcgcacagcggtacggcagcccgtccgcggcgtggcagcactccgaacagaccggatggtactgatccggctaatcgccaacgattttcgtaccggcatgaacggataatgagggaatgacagaagagggaatgacggaaaacgtgaacgagcatacgcagggccatttgctgggggcggccgacatccgacgcatcgccgccgacgcgggtatcagcccgacgaagaaattcgggcagaatttcgtgattgatccgggaaccgtgcgtcgcatcgtgcgcgaggccggcgtgaccgccgacgaccatgtgctggaagtcggtcccggactgggttcgctgacgctggcgattctggaaaccggcgccacgatgacggctgtggaaatcgacccgccggtcgccgaacgcctgccgaaaaccatcgccgaattcatgccggacgccgtggaccgcttccgtgtggtcaaccgcgacgcacttaccgttaatccggagaatctgcccgatttcaaggatgacgattccttcacgctggtggccaatctgccgtacaacgtggccacgccgattctgctcaccctgttggaacgtttcgacaatctgggcaccttcctggtgatggtgcagaaggaagtggcggaccgtttgagcgagaagcccggttcgaagatctacggcacgccgagcgtgaagctcgcatggtacggcaccgcggaacgcgtgggcgtcatcggtcgcaacgtgttctggccggccccgaacgtcgattccgcgctggtgctgttcaagcgctacccgggcggtcacacccccgccgcggacaatgcggacggttccgtggtggatcgcgaaaccgtgttccgtttgatcgacgcggctttcgggcagcgccgcaagaccctgcacgccgcattgaagaaaatcgtgccgtccgaagcgttcgagaaggccggcatcgacccgacccgtcgtggcgagacgctcaccatcgacgaattcgtggcgttggcacgcgcgttggatgaggtgttcgcgtcatgagcaccattgattcgcccgccatcggaacggccaccatcaacgccgtgagcgtggactgcccggcgaaaacgaatctgaccctgcatgtgggcccgtcgcatgccgaatggggcggccgtcatgaactcgacaccatctattgcgcggtcggcgtatacgacaccgtcaccgccacgcgcaaagcgccgggaagcggcttctcgctgaatctcgagggcgcgtatctgggcgacctggcctcttccggcagcgatatgcgccgcaaccacgccgtgctggcattgttcgccatggccgaagcgagcggccatgagccggacgtggcgttgaacatcgacaagcgtatccccgtcggcgcgggcatggccggcggttccgccgatgcggcggcgacgattctggcattgaacacgttgtgggatctcgattggccgatcgaacgcctgcaggaagtcgcggccacgctgggcgcggacatgccgttctgtctgaccggcggttacgcgcgcggcaccggtttcggcgaacgcatcgaacagcttgatgacgatggcgatatcgtacgcgatcttacggaacgtgggtttaccggccatctgctggtcggcgcataccgtgcggaactgcgcacgccggaagtgtatgccacattcgatcagatcggtgccggcgatggcgatgagaaccacctgcagaaggcggcggtctccctgcatccgcgtagcggacaggcgatcgaggaaggcttgcgtgcgggagccagccaggcgttcgtctccggttccggcccgtccgtcatcgcgttcgtgccgacggaggatgcggcggacgccgtgcagcgggcatggcaggacagccgttgcgtcgatcgcatcatcgccacgaacgccccagcccgaccgattgtgcatatcaccgcatgacacatatcaccgcatgacagtaaagttgatggcaattggtttgttcaaaaggaattcgtaaatgacccaggctaacgacgagcgcgccgcgcgcaaagagtacattcgccgccgtcagaagacggtgttcagcatcgtcggagccgtcatggtggtcgccatggtggtgtccctgctgttctttttccatgtcggaggcctgggcaacgtcaagtcggccgccgtacagccgaactacggccagcaggcaccgtgccccatcaaggaagccgacggcaacaaggccaagtatgtggagaatcgcaacatcacgctgcgtgtgctcaacggcacgaagttctccggcttcgccaaggcggtgagcgacgcgttgcagaaccgcgagttcaacccccagacgccggacaactacaccaagaaggtggatcgcacgatgatcgtcttcggcaagaacggcgtgaatcaggcgtacaccgtggcaagcaatttcaccgacgccatgctggttatggacgaccgtcaggaccagctgatcgacgtcatcgtgggcgccacattcgacaatctgcaggatacgaagaaggttcccgccgcaggcaaggcgatcaccggcatccagggctgcgtcgcggtggacaagatgaccgacctgcccaaggcgcccgagcatgatgcggtgaatccgcaaagctgaccgccaatcgaaatcgatataggcaatatgaaaaacccgcgctcccccaatcgggaacgcgggttttcgtattcgagctgttccaagcacactgttccatgcatgcggcgaaaccaccgcatgtcaatcgctattcgccctgctccttgtaccagcgttccagctcggcaacggccacgtcacgctccaccggaccgttatcgaggtggtattccagcatgtgcttgtacgccttgccgaccatcgggcctggttcgatgcttagcagctgcatgatctcgtcgccgttgaggtcaggacggatcgcgtcgaagtcttccttttctttcaggtcgcgtacacgctgttccatctcgtccatggccgccgagaacatcatggccttgcgcttgttctgcgtggtcgtatcggcgcgcgtaaggcggttcagacgctcgtacagcgggccagcgtccttgacgtagcggcggaccgcggaatccgtccacggctcctccacgtagccgtggaagcgcagatgcaggttgaccagctcgctgacgtcctcgaccatgtggtggtcgaaatgcagtgccttcaaacgcttgcgcgtcatcttcgcgccgacggcgtcatgacggtggaagctcaccttgccgcccgcttcgaaacgacgggtcttcggcttgccgatgtcgtgcagcagagccgccagacgcagcgtcaggtccggggccggcaccggaccgtcggaaccggtttcgagggcgacggcgcgttcgatgacgatcatggtgtgttcgaacacgtccttatggcgatggtgctcgtcgatttccagctgcagcgcgggaatttccggcagcacgatgtcggcaagaccggaatcgaccaacgcttcgatgccggcgcgcgggcgatcggacagcagcagcttgaccagttcgtcgcgcacacgttcggcggagacgatttcgatgcgatcgaccatgtcggacagcgcttcggcggtttccggctcgatgcggaagccgagctgcgccacgaaacgcacggcgcgcatcatgcgcaacggatcgtcgtcgaacgactgccgcggatcgacgggggtacgcagcacgcctttggccaaatcgttcgcaccgccgaacggatcgacgaattcgagttccggaacacgcaacgccatcgcgttaacggtgaaatcacggcgggaaagatcgccttccagcgtgtcgccgtaattgacttccggcttgcgcgagtcggggtcgtacgtgtcggaacggtaggtggtcacctccactttcacctcggtgccgtcctcacgcctgcgcatcgcgccgagcgtgccgaatttgcggcccatatcccagaagccatcatgcccaaaacggcgcagaatatgctcaaactgctcgggacgcgccgatgtgcagaaatccaaatcatgcgatttgcgatgcagcagcaggtcgcggacaggacccccgaccagtgccagttcgtagccttccgcagcaaacatacgtcctaattcaatggcctctggccacacttcgaagttcacgccatacctttcagcaccacaagtttttcgtttaccagcataccgttaccccacctgcacacagaattgagtatggttggaatcatgattacgcccgcagaccttgcacgcatgcttgcccatgctgcggacgaccatgcccaaaatccgctggaaccggacgaactgctgtacacatcgcagtcggtttcgctgcagcagctgcaacaactacagcaattgcagcagcgcacgatcatcacgccgagcgcgcctacgccggcgatgatgccgcgccggcgcaccgcggatggtccgaccacgttcgcatcgcttgacgcgcaggagctgccggtggtgcgcgagtattcggcgggcgggctggtgttcgacgacaagggtcgcgtggcgatcatcgcacgtcattcacgcagcgggcatttggaatggtgcctgccgaagggacatatcgaaaaaggcgaaacgccgcagcagacggccgtgcgcgaagtgcatgaggaaaccggcattctgggcgaggtggtcgattccatcgccaccatcgactattggttcaccggtaccagccaacgcgtgcacaagctggtgcaccacttcgcgttgcggcagatcggcggcgagctgaccgtcgaaggcgatcccgaccatgaggccgaagacgccatttgggtggattttgctgatttggacgatgtgctgagctatccgaacgaacggaagatagcatggttgtacgcaaggaaactcaacagacaggcgtaatagtgaatcaatccgcacaacggcacgtttcgcgtggccttcgcgcgttatcatccatcctcgccatggtattgaccatggcgttgatgttgttgtacgcacccacgccatcggcaagggccatggaatcgaccacatcggcggagtcgacggacggtatgttgtccatcaactcttccacggccgtattgacggacacctccggataccatctgaacgccacggtgaccaacacgaccggacaggagattcccgcgggaacgctgacgctggccatgaacgccttctacacgttcgtttcgcgcaacgacatccaggattggtctgaaggcaacgggcgaatccccaccccgcaatccgtgggacaggccgatgtgcccgcgttgcagccgggagccagcgccaacgtgagcatcgacgcggacgcccatcaggaatcgctcgcggccatcaactcttgggggccgaagccggtgctgctgagctattccgccaacggaaccccccttgctcaatcgcatacgttcgtgacgcgcaccggcgcgggactccacacgcccagcacgccggcgctgcacatcaccgtcgcccagccgctggccgccaacgggtggaccaccgacagcaagctgcttggacagctggtcgatgaagggggtatttcctcctcgaaactggcgaaaatcgccatgcccagcaaggatgacgacgcacggctcaaatcgttgcagcagaccttcgccaagcacgacatgctgcaggtcgtaggagatccgacctacctgcaggcgatggcgatgccaacgcgggtcgacggcatcacccagcccgcattgttcgacataaccgcctacagcgccatgaacaacgctccggcctacagcgcagccggtatcaacgaccgtcaatggtccgcagccaaagcccggaaaacctatcaatcggcattgggtgacagcaacgcggacatcaccgcatacgcgtggcagggcaacggcaattggaccctacaagcgttgacgaaggcccgccagcaggggtacggcaccgtcatcgccacgcatgacttcgaagaggacgatgcggataccgtacgtaccggcaagacggtggtctccaccgacgccggggacgtcaccgtgctttccgcgcagaatgtgctttccggcctggcccaaggcaaggcgaccagtgacgatgccaacgccgacagcgagggaaccacggccggcagattggcgcgattcgtcgcgcaaagcgcgttctaccagatggaacagccttatgcggaacgcaacctgctggtctgtctgaacgaggattccgaccccagtgttgtagacgcgctgatgagcgacatcgagcagtcgccgtggctgaacctcaccgatctcgccacgttgaaggatgccgacatctccgaagatgcggccagcatgtcaaccgatcttccccaaacggacggccttaccgatagcatgcgcagcgacgtccagcagactctgagcgcgctggcgaactcatcgagcaacatcaaacgtttcaatacgtcgatcctcgtcaagccgaacggaaaagacgaatccgacgtcaacacctggagcaggcagctgacgaacgcccacaccatcatggccctgcacgcgttgggcggcgaaagcccttccagaagcacgatggcggaaggcgcgaaccagctcgcggccctgctgatcaacggtgtggcgatcacgccgacggaaagcgtgaacgtggtcagcgaaaccgcgaaaatgccggtgaccatcagcaacagccacccgtacccggtaaaggtgaaggtctcgtcgctgaccgattccatgcagatcgtcacgtcccgattcgacaccgtgcaggtgccgccccacggcgaggcacaggtggcgttcaccatccgtgtgtccacgtccggcaccgccaacgccaccatcagcctgttcgacaggaatggtgcagcgtttggagccacgcaggtcacccacatcaccagcgcgctgcagatcagcgacaagagcggtttcgtcatcatcggcttcgccgtgctcttgggcgctgtgggactgtggcgtcaattcaaccgtaagaaggatcccgacgaatgagttcttccgttggccgtaactcactgatcatggcctccggtaccgccgcttcgcgcgtgaccggccaaatccgcaccatcctgcttgcctgggccttgggcaccaccggctatgccgccaacgcctaccaggccggttcgatgattccgcaggtcatctacacactggtttccggcggcatcttcaacgcggtgcttgtgccgcagatcgtgcgcacgctgaaatcgaaggacgccgaaaccaagctcaacaagctcatcacccttgccatcaccttgttgttgggtgtgacgctgctcatggccgttgccacgccgttgttgaccaaactgtatgtcaacggcagcgccgaaaccatggccctcgccacctccttcaccttgtggtgcatgccccagatcttcttctacggcctgtatacggtgatcgggcagattctcgcggcgaaggaccatttcgtcacgtatgcgtggagctcggtcggcgcgaacatcatcagctgcatcggtttcggcgcgttcatcgcgatgttcggcagggccacggaacgtccgctggacttctggacgccgacgaaaatcgcgctgaccgccggcacttggacgcttggcgtggcgttccaggcgctggtgctgttcattcctttgacgagaatcggcctgaaataccgtccgaaattcggcgttcacggcatcggactgcgttcgatgggaccggtcgccgcgtggagcctcggcatcgtcggcgtcgatcagatcgtcaacatcatcgtcacccgcgtggccaccagcgcgccgttcaaggcttcggaacagctgcatatgagccagttggacgtggccggcaacgcctcgtatcagaatgcgtacaccatctacatgctgccgtattcgctgatcgccgtgtccatcgccactgcgatcttcccgaaaatatcgaaagccatcgcggaccgcaatatcgacgaggcgcgcaaggatctgagctcggccctgcgtaatctcaatctcatcatgtgcttcttcgcagcggcgttcatcgtgcttccgttgccgatcatcctcgcactgctgccgtccatcagcgtgcgtgaggcgctgctcatcagcgcgccgctcgccgctttgggcatcggcctgccactttccagctcgtatttggtcatccaacgcacgttctacgcgttcgaagacggcaagcatccgtttattttcatggcgatcaccatggccatccagggtggcgtcatcatcgcgtcgacgttcattctgccgcccacgcagtggatcaccgtcatcggattggcgatttcggtgagcttcatcctgccgtatccgctgcttacgcacatgctccgctcccgtttcgacggcgatgtggacgacaagcgcatcatcaccgcctatgcgaaggcgctggtggccacgatagccgcctgcgtgattggcctgctgtgccgcaacggcgtctaccggctggtcggagcgcatatcggccccgacgacggcactatgaactggggtcaggcggttctgtccgcgatactgctcaccatcgtcatcgccatcgtctatctggcgtgcctgtgggcgctgcgtgccgaggagctcacttcggtcgtgggcatgctcgccgcccgcataccagggcttggcaacaagcctaagtctggcggaacggccagccccaacggtaaacttgagcaaagtaccgccgaaaacggcgaccaagaataacagcgtaggtagaacaatcgttacagagttgaaggaaaccatgaaacctcaactgagagataccatcagcaaccgctatgtgctggtttcgccattgcgcgaggaaaccggcttgcaggtttggaaggcaagcgatcacgtgcttgcccgggattgccagctttttatcgtcaacaaccgcaaggctttgcaggacgtcaatgcgacggcctccatgctggcgatttcccacgacgcccatttcacgcaggtgctgcagcttcagcacgtgggcgaggtggcgttggtgatcacgcagctcgatgccggcatgtcgttgagcgagtatctcacgcagtccagcaagccgctgagcttcaccgcgatccgttccattcttggtgaggtcgtcgaagccctgcacgtgttgcagaaagacaatctcacgcatttctcgatcagcacggacaccgtgcgattgacccgcaacggcattgaaatcgccgacgcgccggtaagcatcatgctggccgatacttcgcgcgtgcaatccgtggaaaaccaggagcagcttgcgattcgccaggtcgcttccctgctgtattccctgctgacgcgcacgccgtcgacgctgtccacgaactaccatcttgacgcgatttcaccgaacgtgccgatggagttccgcgtgatttgcaagcgtggtctggatctcaaggagaaggacggtttcccgaccgttccgatggccaccatcgccgaattggaggcgttgctgggcgactacgagccgctggcgaagcttaacggccccgatattgcgttaccgtccgcggattcggaatgctcgattgtgaacgtgcccctgctgcagattctcgagcaggatgccatcgccttgcccgatacgctggctgaaaccggaagcattccggaaatgacgttcgaagcgcctgaaccacacactgatttctccgacagcaaggaagccttggccaagggtatggccgcgaccggcggtgccgtgaaatcgctgtggaacaacagccgcgaactactcagcgaagaggacctcgacggatcctccgaagatgtggattcgccgttctccttccccatccgtgtttccacgccgtcgccgcagggcgattatcatacggacgattcgcaattggagaagaccggtcgcattccggtgatcggacctgacggacgggtcatcgagccgggcgaggaatccgcacgcgcgttgaaggcggagcaggaagcgatcgacgcggcatatcagaacgaaaacggagcccccgttgcggtgccgccgagctttgcccctaaagcctcttcctccagtccggccgaggtcgccaatgccaaattgttcggcaagctcaccaccaaggtcgtggccattgtggtcgcgttcattgtggtggccgtcgcattgggattcgccattcatggtttgaccaagaagccggatgacggcatcaccaatacgaattccaacaatccgtggccggaaatgaaccttgacgacgtgcctttcggcaataatggcgattccggcaatggcagcagctccgccagcgatgcaaacaacgattccaacgatgccaacagctccgacaacggcagctccgattccagcaagccgaagaaaaccacgaagaagaaccattccgccaagaaggacgtcgacaaggtggtgacttcggataagaaggtgcggaaggttccggaaccgaagatgccagagaacacgactccgtatgagatcgacaaccgccagttcctgtccaatccggacggacaacaaggttacggttattacctccacctcagccagccccagaaagcgtatcgcatggtcatcaagatccgttcttccggcggccagggctacattcgcgtgaacgccaagtccagcccgaaccagggtgaacaggtcgcccagttcgagttcgacgccagcggcaccaccgaaatcaagttcaacaaggccgtggagacccaggacatcctcttgtgggtgccgttcgacagccttcccggcaaccagctgtacatcgattcggtgcagattttctgacgcatcggcagacaaggagggtgtgcggattgttccgcacaccctccttttgtttcacgtgaaacaacgtgacggatagctgacttttttgaacgcctttttgaacgcctttttgaacgccatctgcaaaaccgcccgcaaccgtcgtggaaactgcattacagtagcaaccatgagtgatatgcgtgatgtggtgattatcggttccggcccggctggctatactgccgcgatctatcttggccgcgccggcttcgagccgctggtcgtcgccggcgcgctgacgcccggcggccagttggtcaacaccaccgaagtggagaatttcccgggctttcccgatggcatcatgggtccggatctgatggacaatatgcgcaagcaggcggaacggttcggcgcgcatatcgtttgggacgatgttgtttcggttgcttcgaatgccgattccggcatcaaaaccgtcacccttgacggcggcgacgtgtacgacgcacgcgcgctggtcatcgcaacaggctcaaactatcgtaagctgggcgtgccaggcgagacggaatacgcaggcaaaggtgtctcctactgcgccacctgcgatggtttcttcttccgcaacaagccgattgtggtggtcggcggcggcgacagcgctttcgaagaagctgatttcctgtcccgtttcggctcgtccgtcacccttattcataggcgttccacgttccgtgcttcccgcatcatggtggagcgtgcgcaacgcaatccgaaaatcgatttcatgcttgacgctgtggtgcaggagattcgcggcgacgagaacggcgtacaggaggtggaggtgcgcaacaccgccaccgaaaagacctctgcaatccccgctaacggcgttttcatggcgattgggcacactcctgccactgcttttcttaacgggcttgtagacgtcgattcagctggttatatcacggtcgatggcgccagcacgcgtaccagcgaacccggcgttttcgccgcgggagactgcgtggatagcgtctatcggcaggccatcagcgcggcgggcatggggtgccgcgccgcgctggacgcgcaggcttatctcgattcgctcaagtaaggctcaaatcgttcaaatcattatcgctcgcagagctcgattggctcggttcgttcagctctgctgctgcataagcaggtcgacgatgcgtttcatatcgtcttccgatttgaacacgatttcgattcgcccgtgcttcttcgatcccttgatggagaccttggtgccgaaacgctgctccagaccaacctgaacgggggtaccagcccacggattgagcttgctggccttcggcttcttgggctggtcgctttcggcggccttcatcgacacgatttcctcggtgctacgtacggacagtccctcggcgatgatgcgcgtggccagctgttccatatccgcttccgtcggcagtcccagcagcgcacgcgcgtggcccgcggacagcagtccggatgcgaccttcttctgcacggcggccggcaggttgagcaatcgcaaggtgttggcgatttgcggacgggatttcgacaccgacttggacagttgggcctgcgtcaggccgaaatcgtcaatcatctgctggtaggcagccgcctcttccagtggattcagcgcgacgcgatgcaggttttccagcagtgcgtcacgtagcatatcgtcatcggcggtggttttgacgatggccggaatcgttttcaggccggcgatctgcgatgcgcgccaacgacgttcgcccatgatgagctcgtacatgctatccatgcgcccgtcgaacatgttgtgcggttcggccggtttggctgcggcttccctgcgggcggcttcgatttgcgattgcggacgcttgcgtacgacgattggctgcagtacgccgacttccttgatggattcggctagctcgcgcaggtcgtcttcatcgaaaatggtacgtggctgatgcagattgggaccgacgtcgctcaaacgcagttcaaccagatatccaccctgcacgggaagcagttccggttcgtccttcttatgttcggtcggcgtggtttcacgtgaaacactcccctgctgctcgccctgttcggaagctggctgagcggtggagccgaagaacatgtccgcgggatgcgcgctttcattcaacgaaatcgacggcatgctggcacgacgatgctggtttttcttggttgtttcacgtgaaacagcatgcttcatcccctgcacggcgttcaccgatgcctgtgcggtagcggacgcgctcttggattccacatgcccatcagtcttggaagccttgatttctttggcagcagcggcaggcgccgcatgctcctgatgctgcggctcccccggaagagaaggaaacagtgcgccaagacctttacccaaacgcgacttagttgccatgatcagttctcattccttcttgcatcgattgcctgcagcaccgtatcggaacgacgcgaaagttccagcgcggcttcgcagtacgcgatcgcacccatgcccttggggtcgtatgcgatcacgctttggttgaagcttggcgcttcggaaatcttcaccgtgcgcggaatggtggtgtcgagcacgattgtcggatagtgcttcttcacttccccatgcacttcgcggctcagcagcgtgcgcttgtcgtacatggtgatgagcatcgtggagaccagcagcgacggattgtaatgttcctgcaccagtccgatggtgttgatgagctggcccaaaccttccaaggcgtaatactcggcctgaatcggaatcagcatttcgtgcacggcgcacatggcgttgatcaccagcagacccaggctcggcgggcagtcgatgatcacgtaatcgtaatgctcttcgctggtggcgaggaactcgtccaccgcgttcttcagcagcgagttgcggtccgccatgtcggcgacttccaattcggcgccactcaaatcgatggatgcggggaccacgtcgagattgtcgaaatcagggcacgtgcacttgacttccgcgatgcgcttgcgcccttcgatgacgtcatacaccgaaggctgaccggaggcgtgcggggcacccaatgccgtggaggcgttgccctgcggatccatatcaataagcaggaccttgcatccgaaacgggccaaggccgcggacaggttcaccgcggatgtggttttgccgacgccacctttctggttggcgactgcgatcaggcgcgtttgggccggcttcgggcagaccgcatgctccaatgccttgtatcgcgtcgattcatcagcgatttgcgcgcctacgggggatgtcgagccttcgaagattcgcttgatggtttccgtggcggattccatcgacgtcaaattgtctggttcttcaggtccagtcatgaactagccttcctatacatattcaacaatcaagtttcatcatttgggtggacagattttcacctgttcacggccatgtgcaccattgtgaacaacggtggatagttagtggataactcatccgaccacccaaaagttatccacagaacaatcgttgcaattccaagcttcttcaagatgcttcgtaacacatttccgcgattgtggatactgtggataactcacgcgattttgtggataacttatcgcttgtccaccatcagcacatgcgtcggttccagacccggaccgacctcggcctccaccacgcggggatggataccgccgtttttggagatctctttggtggccttgacgatttcctcctgcgcggatcgtcctttcagggcaaccagccgtccgcctttgtccagcaacggcagcgtccatccggatagtttggtcatcggcgcgaccgcacggcaggtcaccacggcaaacggatgcctgaccgggatgggatttccgtcgagatcgacggcatcctctcccctgcccttccggccaccgttcgaaccgcggacggcttcgattacggcgttggctcgggagcgcactatcgagacattgtccaatcccatttcgtcaacgcactcatgaagccattcgatacggcgttccatcggttccaccaaggtgaactggtggtccggcaggcaggcggccgccacgataccggggaatcctccaccactgccgatatccgccaccgtcttgaattgcctcttggccgttgcttcacggatgaacggtacgatggccgcggagttcagaatatgccgttcccaaataataccgacatcgcgtggccctatcagcccgcgcggctctccttccgcagcaagtttcacgtgaaacaccttcaacttgcccaatgcatcgccaagcacttcctcaagaatcggcgacccatccaattcgtcattcacatcactcatgcacaccatcctaatctacaggcatcaaaaaagcgccgcgagaaactcgcgacgcttcatgtttcacgtgaaactatttcaggcttcgtcgatctcgtcggcgtcatcgactgcggaagccttgacgtacaccgtgacgtaacgatgcggttcttcgccatgggaccgagacttcatgccttcctcgcgcaccacatcatggatgatcttgcgttcgaaggagttcatcggcttcaggtccaccggctcgccagtctcgcgcgcctcgtcgatggcatccagcgcaaggtcgtgcaggcgctggcgcttgcgcttcagatagccgtccacgtccacgatgaggtgggaccgctcgccggtcttctgctgtacggcgagtcgggtgagctgctgcagggcgtccacgacttcgccgttgcgtccgatcagatgtttgatgtcggtgtcgtcgtcggcaacgatctgcacggtcggacggttgttgcgcacgcccatttcgatatcgccctcgtagtcgacgatgtcaagcaatccttcaaggtaatcggcagcgatgtcagcttcgtcattgagctgatcgatggttttctcagcatcctgcgccatggtgttttactcctttgagcggggttcgtattatttcaagtctactgaaagtctactgattgggttgtatcatatgggcgattcgcccgatacaaaagcggtgtgtcctgcgtttcacgtgaaacacaggacacacacttgatgttatttcttcttctttttgcggcttggctgctgacgctggaagccgttcttttccttcgcctccgcggccttcttggctttctgcagctcctcctcttcgagggacggcagaccggccttggcgcggcgggcgttctcgtgggcgtggtcgcgcttttccttcgcttcggcggccggggatcccggagtcgggaagacgtggatctgccagacggaacgcagcaggttgcagatgttgttggtcagccagtacaccagcactgcgaacggcatggcgacgccggagaagatgtacatgatcgggaacatccacagcatcatcttctgcatcatttcagtctgcttgttcgcagcgctctgggccatgttgcgcttcatgctgttgtactgcatgagccacaggcagaagcacatcaacgccacgaagatgccgatgatgatcttgccgtggatgtcggcggtggtgaagttctcggccacgttcacgccgaacacgttggtggaggtgaactgcttggcggtggcgatgtcgaaggcgccgaggccggaaccgttcctgaacttgccacgggcgatgtatggaatggccgacagggtgtagaacatgcacatgaacacaggaccctgcacgaacataggcagcatcgatgtgcagccgcccatcgggttcgcgtcattgtcctggtagagcttcatcatctcgcgttgcaaagcctctttgctggcgggatcgttcttgcccttgtacttgttttggatgcgctgcatcttgggctgcaaaacggccatctgggcctgcatcttgcgcatgcccttcatggacttgtagaacagcgggaacacgcacgcctggaccacaatcaccaggaacacgatggacatgacccacgagaaaccgatctcgttcatgcccagcatcaccatgaatcggtggaatccggccataatctgcgtcatgagccactcgacggggtacaggagcttgtacagccagccccagaaaccactatcgaggaggaattgatcttgattcattacaggccattctccttatcgcctataggttcatctacatccagaggcgtgagacgaggctcctcgtgtgccttcgaccacgaacatctgtaaaacaaggaatagagctgtggaacgtcgtcgattcctccacggttccactggttgcaacgaagaaggcgtaataacgcaagaagaccacctttaaggcagccaaatcgttcaatcgcctgaatcgcataattggagcagctgggataataccggcaccgaggtgcggtatgggcggaaatatgtttctgataccagcggatgagccgcaccatccaattgcgatgatgccccttgctcattgccgggaagcggttttacgtttcaccgcttcgaaacacgatgccatctgctgctcaagcgacaggaaatcggcacgtgcggcacttggcttggcacgcaacacgatatcgcaggattcaggtaatagtgattcgtactttcgtgcaagcacacggaaacgccttttcacggcgttgcgcgtgaccgcgttgccaacagctttggaaacggccaagccgacacggcggccttgcaccgtcgctgtatcgcccgttacgacatcgtcgtgcatcagataatgcacgacgatgtcttctcgcgataccctacgacggcgtttgagcaccgcaacaaaatcgcgatggcttttcagccgttccaccgctctatgccactaaaaaatcaggcagcgagggacttgcggcccttggcgcggcgacggttgatcagagcgcggcctgcgcgggtgcgcatgcgctgacggaaaccgtgcttcatgtggcgacggcggttgttcggctggaatgtcctcttcataattaatgctcccggtgtttttagccatgccaaggcacggctcctcatgagtcaagctctactaaattactctgacccctgaacagattgtcgcgtcgtccatttttcttcacattttcatggggattccccgcataaaacaatccacataatcgttgcgattccgccgaattccccacaaaagttatccacaaactacaacaatgttattcacatttcaatcttttcaacacgcacgccggtggataactcggggaaaagagagtacaaatatacagttgcacatcagtggtacgtctgtcgagaaaggattatcc
